United States Patent Application Publication US 2020/0329713 A1 - sequence listing, part 5

SEQ ID NO: 2 - DNA, 6618583 bp, Bacillus thuringiensis (residues 1,654,647-3,309,292 of 6,618,583)
ttattaacttgagaaccgaagaaattatttatagcattgtttggtccagataaagcatttaatgaactgaaatttggtccaaataaagcttgatccccggttaaatctgcatctccttcggtagaacttaaaaataatctcccgcttactggtcctcctgaaggtgttaaaaatccagaaacagatacatcggcactaccagtttctgcagaaacacggttaccagctacataaatggttaagtttcttgcaggtaaggaaccattttgataagcgacaatgagcgtccatccagaagaattgatagccccattagaagcatctaaaggatcaacaagtccagggacagagccggttgtataagagccagatccagcagcttgaacgagggatgttacatctgcagatcgtgtatagaatccaaatgtgacagatccagaaacgaaagtttgatttgaagctgtaatagccgaaggggtaattgagtatgttgacacaggtgttgtgaaagaaacaggattccctaaaatactcgtaatgttttgatcacgagataaatagtttccaccccaaacgagttctgcgtaaagaatagtactaccagcagggatatttaaaatagtggtagaactattttgtgtatagtttaacgttgtacctgcaggaaaagtaggtacttgtaaagcagtattcgtagttacgaatgcaccaattgcaccaattgcaccgattgtaccagcacggttttgattgctaattttacttaagcctaaagtattacctgtaatagcgagtgcgccgttagtggtggtagaaaatcgattcgtaatgggcatgttgtcacctcatttacaatatagtcttggtcaaaataacatatgtgtgtgacaaataaagcgaaacatgtacaagttgatttcgtaataatgatttaaatgtctagataaggggatggagtatgattgaattagaaattaggttggagcgtcttagggaagaacaaataggcgatattgtagcattgtcttcttatattggctgggattataacagagaagaagttgaaacaatttttaactcaggtattgtatacggcgtatggaatgagagaaaggaacttattgctagcgcggcaataatattatatggggagaaattagcgtctatcggaatggtgattgtacatccagattataaggggagagggattggaaagataataacggaagcgtgcgttaaaagcgtatcagctcatactccaattatgctgattgctacggatgaagggaaacctttatatgaaaagttaggatttagggcagtaagttatgtttctaaatacatatgtaactcatacaatgcgaaagattattgtgtaagaaatgaagattatgtgatgaattatgaagagggtgatttagaaaaaataataaaaatagatgaatatgcgtttggaacaaatagaaaagagtttttaaagaaaagaattatgcaaagtgaacagtgtatcgttgtaagggacaaggaacaaaatgtattaggttacggtttaagcatacaaacaccagaaaataagataatagggccggttgttgctaaaaatgatgagatggcaatgagaatagtacatgatttagcaagagggcataatggtaaattaagaattgatgtactagaaggaaagaacgatttcatgaaagaattagagattgctggttttaaaaaggtgaatataccgccaattatgatgaaaaatagtaatcggttaataaacagaaatagtgaactatatagtattgcagcgcaaatttttggataaaaaagaacccttttaaatgaaggattcttttttgagccaatttaatcacgatattggtcatgagttggctgaaagaggtcttcctcgatatctcgcaccatagaaaaatgatcaacgttataatgaccgtgtaaagttttattgtgatgaccaataatttgttctgcagacaatacgttagaatcagttgttgaatgaccgtttttaattaatgtaacgtcaaatccttgtacagttgctgtcctaacggcagtgtcaatgcaatgttctgttttacatccgcctataacaatatgattaatgttttcttcttttaaaagttcaagtaaagaagtaccgtagaatgaattggttgctgctttattaataaagattgcagactggggtacttgaatttgattatgtacttcaaatccttcgccactaccagaagcaacatcgatatctcttacgaaaacaataagagcatttgaatctattgctttctggagggctatatttagtgtagataatagctcggttttacgaaaaacttcattttcttgctcatttccatcaattaattcttgctgagcgtcgataattaatagtgcttgtttcatcgtgtctcccctttaatatgaaataagttccactgtacatattccttcagattattagaaaaccctccattgtaagagaagtagaagattgatttacaaagttgtcaaagaaatttcattctcatagcgtgtaaaaacatgtatgataggagatggagaatttttgagtaggtgggaataacatgcaaacagtagaagattatctttcattcttacatacgaaaggatttaaattatcagaggaagcacaagggtttattatgtttggacaaggatatactggtgcgtctgatgggattgtgaacgcagcaatagaagcgacaattaaacatcaattgcagtttgatggtagttatttcgttgcgttattagaacgattgaaagaggaagaaattacagataaaaaaagcgctaaggcttttatgcggaagttacaagcgtaacttcacgcagcctgcgcttctttttttgttttggaaggtaattcaacaaaaatcatgcctagaaaaatacatagacatccgataatagcagaaatagaaagttgttcatttgcaacgagaacgcctgttaatgcagcaaaaacgggctccattgcgaaaataattgctaccctcgttggagaagtgtgtttttgtgccgatgtttgaatgaaaaaagcaatagatgttgcaaacagggcagttagaaagagtgcgaataaaaaggattgattcgtccatagtgatactgaaaataacttttcccaatcttcaaacaaaaaagcgcaaatagaagaaaatataccaacagctaatacttgagatgtgcttaataataaaggtgatattttcttagaaaagaagccgttaataagaatatgggcagcgaaagcgactgcacaaccgagaacaagtatatctcctatatttaattggaaagaatcagcagctgttaataagtataaacctgttgtagctacaacaataccaagtacgatgaaaatggtagctttttgttttaaaaagataaaggaaaagattgggaccataacaatgcttagcccagttaagaaacctgcttttgaagatgttgtatagagtaagccaaatgtttgcaataaataaccgacaaataagaagaacccaactattaatccggctaaactactatgttttaattcttgttttgaagttttctgtgagaaaataatttgaacgaataataaaataattccagcgaataaaaagcgaataccattaaacgtaaatggaccaacgaaagacatagcgttttgaacgacaacaaacgtagctccccaaataaaagagacaaataataaagcaagaggagcaatccactctcttttcacactcatacccccgttaattttgtaagatagcttttctagctaattcatcagctactttattttgactacttggaatccacttaataaaaaagagatcgaagttttttatgtactgcagtgcttcatctaaaagaggtgcaaatattttattttttgcgtattctttttcaacagcccgttcgacaagctgggaatctgtacgaaaagagacagtgctataattatgctcgatgcaatattttaatgctagaagtaaagcgcggtattctgcttcatgattggacattgttccaagtggtactgataattgtacaggcggctgaacgcctttaataaacactcctgcaccagaaggaccaggatttccttttgatgcaccatcaatatatacttcaatcaaaatgagaaacctccaaattataagattatcccctacttaaatatttttttgaagtaggggatagggtagttatccgattgtgatgctgtaacgacatgtaaatgtttcattcgcttgtaaagattgaattccctttttgtccttgaaatcttttgctggatttacttcatcagcgattccataccaaggttcaatacataagaaaggtgcgttatcccctggtgtccatacgccgacaaatggaaatccatcaaattctacttttacaaatttattatgtttatgagaacgaatcgaaatttcattcgtattcatatgttcaaaaataagtgcatcatttttgaataaatcgtatgtaagtggcaattcagtcgtattttcagcgattaattgctttttgtttgaaagataaggcccttctaatacgcttgtttctaagcgttccgaaccattaaacgataagtgataatctgtaaatgattcaccgtccaataaagggaagttgaatccaggatgtgctccgattgagaagaacatttctttagaagtaggattgtttacttcatatgttacatgaacactttgtccatctagctcataagaaacgagtaattcgaattcgtatgggtatttttttaatgtttcttcattactagtaacgatataagtgatctttgtttcgctttgttctttcacagagaaagtaagatcacgagcgaaaccgtgttgtgttaatgaatatggtttaccgtctacgtagtatgtattatctactaatcgaccgacaattgggaacaaaattggtgcacggcgtccccaataagtagaatcaccttgccataaatattctatgttgtcttcttttaagcgaacgctctgtaattctgcacctttgtcagaaatggaaacgatcactttttcattttgaattgttgctgtcatgaagtgaaacctcctaaatctttcatatgtttcattatacgttgtctaaaaggaaaaaggtagtttatgataggaaatctattgacgaaagaggggctaccacgtaaaatataatcttgttgctaaaaaaaagaataacgtggttcgaaaccatcccacgtaaaaaaactaaggagattttgtcatgaatattagaacattagtcggtaatggtattttagcggcattatatattgctgtttctatgcttattcagccatttggctttacaaatgtacagtttcgtatttcagagatgtttaatcatctcgttgtatttaacaagaaagcaatttacggaattgtattaggtgtatttttaacgaatctctttttctcacctatgatcgcttatgatttagtatttggagtaggccaatctattcttgcgttagttgcaacgattatttctatgcgatttattaaaggtgtttgggctcgtatgatttttaatacagttatctttacgattacaatgtttatgattgcaattgaacttcatcttgcattgggtttaccatttatgttgtcttggttaacatgtgcaatcggtgaatttgttgtcatggcgattggtatgcctgtaatgtactggattaataagcgagtacaatttgaaagatttatgtaatagatgaaagagctattcctatagggatagctctttttgcatgtgataatattgaatataattctttgactcttgataaaatataataaaataaagtgaggcttttattagctggctacatataagaagtcttacataaggggaatgtagtatgaaatataaaattcattggttgtataaaacgaagcgcggattgcagacggaattaacaacagagtatatgaacatagaagaaatacttcaatttgcagaggattttgagaaaacaggaagagtaaaagaattttcattttatgatgaaatggacgcagaatggtcattaaaagagatgaaaaagttaagtaagcaagtagaggaagagccccaagaaatactcgtttattttgatggggggtatgatgtgcaaacgaaagaagctggcgttggtatatgtgtgtattataaaaaaggaaatacaaactaccgcattcgccgcaatgcatatatagaaggtatagatgataataatgaagcggagtatgcatcactattatacggtatgaatatactcgaggaattagggattaaatatgaagcagttacacttcgcggcgattctcaagttgtattgcagcaattagccggagaatggccttgttatgatgagcatttaaaccattatttagatcaaattgaacaaaaggcgaagcaaatgaaattaaaacttgtatgtgaaccgatatctagaaaacaaaataaagaagcacatcaattagcaacgcaagcattagaagggacagtcattgatagtcataaagaaataaccgaatagagaggtgcaaaggtggataaaaagcaactcattacagaggtaaatgacttattagaaacatactgtgaaggatgtttcttgcgagaacataatcgaaagacaaatagtaagtattatgctcattcattttgtataagacaatgtacagttggagaaacattgaaaaagtatggagaacagttgtcataaaaaaacatccagagaaaattctctggatgttttttagtgctttgcttcgtttaattgctgctcgcatttgcttagtttcttttcctcgttcattaaaaatggttcatctaaatctactgcaacagatttcataatttcaagctgtgagcgagctgcttctactgcagtagtggcatgctctaatgtgtctggatccattgaaattgttgcagaacctaccatcttttgtgctgtttctacacggaattttacttcttcaaaatcatttacttctgatcccattgttactgcctcctttgtatattgcgcatttcacatagtttttgctctgtaaaacggaaatatacaaaggaataataaaggaggttaccaagtaaggtaacctcctgttatatgttggattaaagttttactacgttagcagcttgaggtccacggttaccttcagtaatgtcgaaagatacttcttgaccttcttctaaagctttgtagccatctccttgaatagcagagaaatgtacgaatacatcgtcagcgccttccatttcgataaatccaaaacctttttcgttgttaaaccattttacttttccttgcatgttataattcctcctaaaagcgtttactattttcatttagtgaaattcatttgaaaaataatataaactaaaaatgctatattcttgaatattctgctaaatgattaatttaaatatacacgaattgggagaatttagtcaagtaagcgattttattttttgtatttttaaataatttttcagtcgaatttttaaataggtataggacaggccgagtatgtaatattcttaattgaatgctatacataatgaggtgaaagaatgaataagtcttacttattagataatgaagaaatgagaacgagaaccgacataccggattgggttgcaaaagaatttgagattttttcaagtgtcgtgttagaaccaacttttccatgttatttcggtttaacagctttgaaaaagaatgaacttcgctattcatttctttctcataatgattggagtcatttgccacatacaatgttatcttttttagagttaatgaaagagaggccgattgtaagaaggggctttttcctttttgtagaaccggaatgtgaagaacaatcactcgaatattaccgtgattccttttggaaagtgctacagtatttacatgaaaacgataatcaagcatggccaaagcaaattcctgaagatccagatcattatttatgggaattttcatttggtggtgagccaatatttgcatttggaaatgcgccagcttataaacaacgaaaaactagacatttagggaattctctcgttattgggtttcagccacgcactatttttgatggattagagggagatcgtcctaaaggagcatattcaagacaaatggtccgtgagcgagttgaaaagtgggatcaattgccgaaacatcctaacattagtcattacggtgacccagagcatcgtgaatggaaacaatatttcataggagacgatgtagagctaataaaagggaaatgtccttttcttcataggatagaaaaataagagccatcatctggatggctcttttgtatattttggataaaaaagggtattttattacgaaagctagtctattttttcaaattatatcattaactagtaataaagagagtagaaaggatagagcgatgtttggagcaattatacagcaaatcgtattaggtatatcattagctgcgccagtagggccgattaatattgaaatgttaaaacgaggaattgaacgtggtttttggcacgcttgggttgttggaattggtggaatgactgcagatgttttatttatgcttctcatttatttcggtttatcttctgtgtttatgtatacatatgtacaagccttcatgtattgcacgggttttttcttgttattttatttaggatttcaaagtgtaaaacaaggaattttcgaatcgaatatggaatataaaaaagaagaggtaggtggccttaagcaatcgtttatggcaggatttttaattgcgatatccaatccattaaatcttgttttttggtttggtatatacggaagtacacttagctcattacttacgaaggtaacgaaacaagaagcttttttgtacagtctttgcattattgttggtattattttatggaatttaaatattgctttttctgtacattttggaagaactttattaaaaccaaaagcgcttggctacataacagccggagcaggtattattttagtaggttactctatacattttgcatacaaagctttacagttgttcacataagattgaaggggagatttttatgtatcgaaccactattgacggaaaagaaattataattacgttagcgccaaaaatccgaaaagaaattactgatagaaatccactatatgaagcggtatttcataatgctgcaagattgttacaaacaaagcaaccgacgtttgcagtaaatcatgaaatatttgggctcattattggagaagtgcaaagaggagaagtaacagtgtttgcagtggaacatattattccgaagcaaaatatatttggatcaaacaattttttctcggcaatagaacagcaggcaaatttgtaaagtgaatagaataagaatagaaaagaaatagtcgtaacgatatgttgcggctgtttttttgaaaaagggggaaacaagatgaagaaagtggggaaagagttctttttacaacatgatattgttattatgtatagcattctatttatttgcattattattttaaaaatgcaattttttacgtggtttggcatgttagcatgtatgtttgggattgttttctatacacttaatgaatatatgacacatcgttttttattccatataaagccacctaaaaacacatttctattaaaaatgttaagaagattgcattatgatcaccacgtatatccagatgatttaaaacttttgtttttacctgtatggtttagtatacctagttttactatatatttacttatagcatatggtattacaaaaagtgttactattgcactttcatttggaatcggaatgattattatgctgctcgtttacgaatggaaacattatattgctcatagaccgattcgtcccgtcactaagtttggaagatggctaaaaaaacaacatatattacatcattataaaaacgaaaagttttggtttggtgtttcaaatccagtattcgattttatatttggaacacttaaagatggaaaagatgttgagttaagcgaaacggctcgtaatttagaaaaggaaaaaaagacaaaagtagtgcgttaagcactgcttttgtcttaatgaggataaataagtaaggtgtcactttattttgaaaaagtatattaaaaatttaggggaaattgccgaaaaatgtctatcaaaaaatctttgcatgaatgcatggattgtctaaaatgaatataagtttctgaatatttataaaatttagtctttaggtatgcaagggggaagtgtattttaagtaagagaggggatcggttaatgaaacgagacgatacgtcagcacgtaagttgcaaaatgaggtgaattatacagaggtcgttcagtcggaagaatttcaattgttattaaatacgaaaaagaagtttatcattccaatgagtattttcttttttagtttttttatcgcattacctattctaacatcgtattcaaaggtgcttaatacacctgcatttggagacgttacatgggcgtgggtatttgctttttcccaatttattatgacatgggcactatgtatgatttatagcaaaaaagcagaatcatttgatgaaatctcccgaaaaattttgcaagatatgcaaaaagggaggggctgaacttgaatactactgcatttgcactatttttaattattgttcttggtacgctcgtcataacctattttgcatcgaaaaaaacgaaaaatgcgagtgaattttatacggctggagggggattaactggttggcaaaatggtttggccattgctggagattacatgtctgctgcttcatttctcggtatagctggagcaatcgcattaactgggtttgatggattcttttatagtatcggttttttagttgcttatttagttgtactatatcttgttgcagaaccgcttagaaatttaggaaagtacactttggcggatatgattgcagcacgctttgacgcgaaaaaagttcgcggagttgcagctcttaatacgatgacgatttctatcttttatatgattgcacaattagttggcgcgggtgcacttattaaattattattagggattgaatatacgacatctgtattaatcgttggaacacttatgacggtgtatgttatttttggtggtatgacagcaacgagctgggtacaaattgtaaaggctgtattacttatggccggtacgtttattatttctgttatcgttttcgcaaaattcaacttcagcgtgactgaaatgtttgcccaaatgaaaacagctacaccattaaaagattcatttttaaatccaggtgtaaagtataaggatggccttgatacactttctttaaatttaggactagtacttggtacagctggattaccacatatacttgtccgcttttttacagtacgtgatgcaaaaactgcacgtcaatctgtcgtatatgcgacatggttaattggtgcattttatattatgacgattttcttaggatttggtgcggcagcgtttgtaggaaatgaagcgattattaaagcgaacccagcgggtaatatggcagcacctttattagccaaagcgttaggtggagacttcttatttgctttcgtatcagcaattgcttttgcaacaattttggctgtagtggcaggtctcgtattaacggcagcatcagcattcgctcatgatttttataatgagatcattcgcaaagggaaatcatcggaaaaagagcaagtatctatggctcggtatgcatctattggagtagcgatattatctatcatacttgcattatttgcccaaacattaaacgtagcatttttagtatcattagcatttgcagttgcagcgagtgcaaatctaccagtgattttatttacaatatattggaagcgttttaatacaacgggtgctatttcaggtatgatcgtagggctcgtatcagcaattgttctcgtagcgttgagtccgaatgtttggaaccctgtagctggaaaagctatttttgttggggaagcgatattcccatatacgacaccaggaattatttcaattccgctcggatttcttgcagcatatttaggaactgttttatctagtaagaaagaagatgcagcgaaatttgatgaaattcttgtgaaatctaatactggtcacggtattagtgatgcgtcttcacattaaataaaagaggagcttttcgatagataagaaaagctcttttttcttttgtcattttcttgtaaatattactgatttgtaagtaggatttgtcttaattttgtggaatgaaaatagcagggagaaatttaagtcatcatggcaccagcgcagcttttgtgaaaaataagttgttatggaaggtggaagtaatgatgaaaacgaagcaaactgatgaattattagcaaaagatgagcaatatgtttggcacggaatgcgtccctttagtccaaatagtacaatggtaggggcaaaagctgaagggtgctgggttgaagatatacaaggaaaaagatatttagatggtatgagtggtctttggtgtgtgaatagtggatatggaagaaaggagctcgcagaagcggcttataagcaattacaaacattatcatactttccaatgtcacaatctcatgaaccagctataaagcttgctgaaaaattaaatgagtggcttgggggagagtatgttattttcttctcaaatagtggttcagaagcgaacgaaacagcttttaaaatagcaaggcaatattatgcgcaaaaaggtgaaccacatcgttataaatttatgtcacgttatcgtgggtatcacgggaatacaatggcgacaatggcagcgacgggacaagcgcagcgtagatatcaatatgaaccgtttgcttcaggctttttacacgtaacaccaccggattgttaccgtatgcctgaaattgaagggcagcatatttatgatgtagaatgtgtgaaagaagtcgatcgtgttatgacgtgggaattaagtgaaacaattgccgcttttattatggaaccaattattacaggcgggggcatattaatgccaccacaagactatatgaaagctgttcatgagacgtgtcaaaaacacggtgccttgcttattagtgatgaagtaatttgcggtttcggacgtacaggaaaagcatttggatttatgaattatgatgtgaagccagatattattacgatggcaaaagggattacgagcgcatatttaccattatctgcaacagctgtgaaaaaagaaatatatgaagcatttaaagggaagggagagtatgaattcttccgacatattaatacatttggtggaaatccagcagcttgtgcattagcccttaaaaacttagagattatggaaaatgaaaatttaattgagcgatctgcgcaaatgggttcccttttattagagcaactaaaagatgaaattggggaacatccgcttgttggggatattagaggaaaaggtctattagttggaattgaattagtaaatgataaagagacgaaagagccaattgataacgacaaaatcgcaagtgtcgtaaatgcttgtaaagaaaaagggcttattataggacgaaacggtatgacgacagcaggatataataacgttttaacattagcgccgccgcttattatttcaagtgaagaaattgcctttgttgttggaactttgaagacggcgatggaacgtatttaataaatagagagaggagcgagctgtaatataaggctcgcttttgttttttagtaggaggggacttttaatggagaaatatgatcctaacaaacattatcatatcggatattatgaagacggatatgatttagaagtgacggcgtacaaaagaataaatgaaccagtttgggatgcttatcttccgcactatgaggtagacgatttttacaaaaagtggagaaaatgaagctaggtgaatatatagatgactatggtattaaagtatattcatttagtaatgacatcgatgatgaagaagcacgaactatttttgaaaactggttaaaaacgaatggaattgtttaaagataaaatgaaaaaggagattactatcttgtaagatagtaatctccttttcttattcttatagtaaatttacttacttacttacttgcttgctttcattgctttatcttttgcaccaaaagtgtattttaacattggtggtgtaatcattgtagttaaaataacgacaataacgattgctgtaaagtaatcttgtgccaatagacctgaagaaagtcctgttcctgcaatgataagtgcaacttcaccacgagaaaccataccagaaccgataattgcagaagacttagcatcaaatccagtcatgcgtgcaccaacaccacaaccaattagtttcgttaatacagcgattactgttaatgctaagatgaaccaaatttgattgccaataccgtcaaatgtaatattcataccgatactaacgaagaatactggaacgaacatagcgtaagcaattggttctactttcttttctacttcatgtttgtagtttgtttgagaaattgcaataccagcagcgaaagcaccgataataccagcaattcctaatagttcgccgaaatatgcgaatgagaaacagatgataagagctgcgctcacgatagactcagatacgcgcagtggtgacaaccaacgcataattgctggaacacctttccatccaattaaaataatagaagcgaagaatactactttcttcaagataatcattgttaagttaacatcatcagtgcctaagaagctcattgcgaatgctaataaaataacaacaagaatatcatcaaatacagcggctccaagcatcgtcgtactttcacgtgttttcattttacctaaatcacgaagtgtttgtacggaaatactaacacttgtcgcacatagaagtaatcctaagaatacagcgtttccttgttccattcccataacaaggccggaaacgtaaccacctacgaatggaagaataatacctccgagtgcaactgctaaagaagaattacgattggcgtttaattcttctaagtctgtttcaagtccagccataaacattagaagaataaccccgacattacttaattgagttagaagctctgaattttcaatccaacctaatacagctggaccgataacgataccgacaattaatttacctagtacagaaggttgacctaatctaacactaagatcaccagcaagctttgtacttaataaaataagtgcaatttgaaagaaaaattcgaattccatctgatcctctcctcatcatttttagttttatcatacgatttctcggaatttgcctaatgaaaatatgtaaaacccattaaacaaaagggtctgattacgagttcttttgaacttgtaatttgaacctgtaattaatatataatatattttgcaaaaaatcaatgaaaaaatgggagcttttttagagagagacggtgttattagagatatacatataagaatagtgtgtgaatttttatatgtatgaaatagtatgaagtcctttttcattacaaataataaagcctaaatgctatttcacgaattataaatgtgaaaaggaggttttatcatttgaattcattaaaaaataacttgtctattgttgctttaggtggagtaaatgaaataggaaaaaatatgtatgctatccaatatgaaaatgatattgtcgtcattgattgtggatctaaatttccagatgaaagtttattagggattgatttaataattccagacgtcacatatttgcaagaaaataaagaaaaaattcgcggtttagtagtaacgcacgggcatgaggaccatattggcggaataccatattttttaaaacaactaaatgtaccaatctatgcaacaaagttaacgttaggtttaattgaaattaaattaaaggaacacaatcttcaaaatgatacggaattaatcgttattcattcagaatcagaaattgattgtggttctattaaggcaaccttttttaaaacgaaccacagtattccggattgtctcggtattgtttttcatacaccagaaggtactgtagtacatacaggtgattttaaatttgatttaacaccagtaaataatcaacatcctgatattcataaaatggctaaaataggaagtgaaggtgtactagctttattatctgaaagcacaaatgcagaacgcccaggttttactccatcagaaaggtcagtaggagaacgggtagaggaaatatttatgaaagcaaatagaaaagtaattatttctacatttgcttctaatgtgaatcgtgttcagcaaatagttgaagcttgcataaaaacaaatcgaaaattggctttgctcgggagaagtatggtaaatgtagtagaagttgctctagagaaagggtatttacatattccagacggcatgttgattgaagcgagtgagataaatcgtttagatccaaagcaggtagcgatactttgtacaggaagtcaaggagaaccgatggcagctttagcgcgtttagcgagtggaaactatagacaagttgatgttttaccagaagatacggttattatagctgcgactccgattccaggaaatgaacgtaacgtttcaagaattatagataatctatttgctttaggagcaaaagtaatttatggatcaggtagttctactggagtccatgtatctggtcatgcgtatcaagaagaattgaaattaatgctcactttaatgaaacctaaatattttatcccaattcatggagagtttagaatgctacatcaccatagtttgttagcagaatcaattggtattgaaaaggaaaatatctttatcgtacgtaatggagatgttgtagatattagtaatgaagtggcaattcaatctagaagaatacaggcaggaaatatatatgtagatggattaggaattggagatgttggaaatgcattattacgtgatcgtaaacaactttcagaagatggaatgctcgttatagttattacttttaataaagtggatggagaaataatttcaggtcctgatattatttctcgtggatttgtctatgttcgtgattcagaagaatttttaagagaattaaataaattagctgttattacaattaataatttaaagaaagagaatgtgaatagctggggtattttgaaaagggaggtaagagaagcgttagggaagtatatatatacaaatacaaaacgaaagccgatgattcttcctataataatagaggtttaatagtaaaaaaagaattctcgtatgggaattcttttttgttttgaagacaaaatgaacatataatgaaataaatagaaatggaaggaaataaaagatgttattaaataaacgttttacaattggagaaatggcaaaaatgcataatatcgcagaatctacattaaggtattatgatgaaaaaggaatttttcatccgtccattgttgatcctcaaacgaattatcgttattatacaatcgatcaattttcactattagatacgattaagtttttacgccaattaaacattccattaaaggaaattaaaaaatatattgatgaaagaaatccagcatacgcactcaatttactggaaaaacaacaagagatgatgctgaagaaacaaagagaaattgagtatgctttagcgaaaatggagcatagaattcatttaattaaggaagcaacaaaagcaaaagctgaacaaatggtaataaaagagatcccgcagcgaaaaataacagctattgcggttgccccgaatacgacggatgatatgtttgagtactacattcattcgttgcaaaaaaatatgaggcaaatggatgatagcttattttctggagatattggtgtaactgttgcgaaaaaagggttaatgcaaaatgagtttcaagcatatagcagtgtatttattcttttggattatatgccttttgaagtacagagttcagatgaaattaaagaaggtatgtttgcctgtgtatatcatcatgggccatatgaagaaactgatgaaacatataagaagctaatgaaatatattgatcaagaaggatacgaaataagtggagatgcaattgagattgcattaattgattggtctgtaacagaagatcctgaggagcaagtaacagaaattcaaattcctataatgaaaaaacaaagcaataagttatagggctcgtataattacaaatgagcatcaaacgcgataattaagtcacctattttttaattctctattgaccttaaagttacttgaaggtttaaactaagaaaagagagttgaaaaaaaggagcatattagagtatggaagcaacagaaaaattaagagaaaaaccaattaaaagcttatttatttcttatttaataccagcagttcttggaatggtattaatgtcagtgaatattgtaattgacgcggttatgattagtagaggagttggggcgaacggtttagcaggagtgaacgtggctattccagccttttcgattttcttctctatttcattatggatcggaatgggcggggcaacgttatactccattgcattaggtgaaaataaacgagaaagagcaaggtctatttttactcaatcaatgacggtagcagttgttatcgtagggattttagcagcgatttgcttatggagaatagaagatttagcatacttatttggtgcaaacgaagtgattctaccatatgcgttagactatttacacgtattattaacatttggaatgatatacgttttagaaaatattttaagtacatttatacgaaatgatggaaatcctaatttagcaatggctggtcttgttgtaacggctgtattaaatatagtgtttgactatatctttatttttatctttggatggggcgtaacaggtgctgcctcagcgactattctttcggcagcgattggtttccttgtattattaacccatttctttagaaaaagtagtattttaaagtggacgaaatttcattttgaatgggatactgtcaaacaaattatggtgattggtttcccaagttttacagcagaaagtacggttgcaatcgtaacgattggttttaatatcgcatttgtccaatatgcaggagaagtaggagtagcttcctatgcgatggtgaatagtattcatgcaatgacattactattattctttggtgttggagcagcattacagccaattgctagtttccattacggggcaaatttatcagagagacttcgtgaaggattgaagtttgctgtgaaaattgcagttgtccttggaggcgttgcgataattgtcggattattcttcgggaaatatatcattggtttatttgatgttcaatctccagaattattggagttaaccttaacaggtattagtttattctttatccaatacgtatttttaggttataacattgtgtatggagagtacttccaatcagtgcgacaaacgaagaaatcagtacttattataatgagccgaggattactatttattattccattgttatggattatgccgaaactatttggtataaatggaatttggctcgttatgccagttgcagaagtaatgacagcgattatcgtatttacgatgaatcgtatgaaacatcctgttccattaaatatggcaggagagaaagaagcgatatgataaaaaatccccttaagcaattaaggggattttcttattcctttaaactaatagcaaaagatccatccgtttcttgaacagaagcaaaggcaacgtttttaatatttgtaattcctttttcttttaattctttatataaccatttttcatctttatgtattaactttaagttatcatattgaatttgtgaatcgacgataagtgcaattggtaatccagcatacttaacatctatgtttaaatcttttggagttaatggtacaagttctctttttggtaaaatactaatagcgccgttcgcttctaaaatagcgtattcaatttcatgaacacttggatatcctgcaacgcgaagattagaaagcagttctgcaatggggtatctacttttttgtaagttctcaaaaataatatcaccatgtttaattaaaatgatagggtgtccgagaataaaacgatttagtttgttgaataggcttaattttgtaaggagtaaatgtaaacatgtgataacaaccataccgagaaatgcttgtaaagcaccagagacgggtatggcctggaaagctaaataagataaaaaaattatagccccaaaatcatgaggagttagttgcgctaacgcggatttaccgagtaacttaagcgatagcaaaaataagatgaaaaagaacgacacgttacataaaaagagaagcaatagagacactccttcgtgtaaagttgtacttactattcccgaaagtaatataaatattacctttcagaggataaattagggtttattggaatttgtctgtatacaaacaaataaatggatattatcatgaaggaagtaaaagaaaataggagtatatgaatatgagaaagaagaaaataatgaagggcattttagttgttataatgatttgcgccgtgtatgcggggtttttacaatatcacatttataagcatgggcatatgaatgcaacatacgatgctgattacataattgtactaggatcgaaagtaaatgggacgaaaccatcttattcattgcaatatcgtattgataaagcagctgaatatttaaaatcacatgagaaaacaatcgctatcgtatctggaggacaaggaaaaggcgaagacatttcagaagcattagcaatgaaacaaggactaataaaacaaaatatcgcagaagaccgcattataatggaggacaaatctacgagtacagatgagaatattacattctcaaaaccgttaattccagccgatatgaaaaaaggtatgatcgtaacaaacgattttcacatgtttagagcgaaaaaaatagcggccaaacaaggtttacaattagaaggtcttccggcaaaaacaccgaaaccaatcatcattccatcgaatgtacgagaatatttagcaattacacagtattggtttatgaatcgaatatagtgaaagtgatcccgtctgaaactcaggcgggatttagtttgaggaaaatcttacaaatatgtcacgttcgtgaaaggtaaagcgatagtttctagaatgatttcctgacataatgaaggtaacaaaaactatttagaggtgaatcggatgaaaggaaataatattttatcttcgttatgttactttagtatcttttttgcaccatttttactaccaattatcgtgtactttgttgcagaagatgaagtgaagtatcacgcgaaaaaagcattttggtcacatgttttcccatacgcaatcttatttggaggactagcagtatcaggcatgtacggtttaggtttcaatcaatctgacggtgctggaattggaatggctatcacatatgcagtgttcattcttgtaggaatttactacttcatttggaatatcgtaaaaggtattaaagttttgaaaacggcgtaataagataattataatttcatttaccgtatcgataaacgttttaaaaaagggcaattcaaaaagaattgctctttttgtgcttataagttgtgaaaattgaaaaagatatgttaatttttcattatgaagagaaaaaaggagtgattttcatgaatgagatcatacataagatggagcaacatgtttcagttcgtaaatataaagaagaatcaattccgaaagatgtagtagaaaagatggtgcatgctgcgcaacatgcagcttcatcacattttgtacaggcgtattctgttatatatgtaacagatcaggaattaaaggctaaactagcagagctatccggaaatcgccatgtgaaggactgtgcagcattttttgtttgttgtgcagatttaaaacgacttgaaattgcatgtgaaaaacatagtacagagataaagcatgagggagtagaagactttatcgttgcgacggtagatgcttcactttttgcgcaaaacttagcactagcagcagaatcgttaggatacggtatttgttatattggtggtattcgtaataatccgagagaagtgagtgaactgcttcatttaccggataaagtatatcctgtattcggaatgacagtcggtgtaccagatgaagaacatggagttaaaccacgtttaccagtagcagcagttcttcatgaaaatggatatgatgaacaaaaatatgatgaattactaaacgaatatgatgaaacgatgaacgcgtattataaagaaagatcatcaaacaagaaaaacgtaacatggacggaatcaatgagttcgtttatgtctaaagaaaaaagaatgcatatgaaagagtttttaagtgaaaaaggattaaataagaagtgagtaaagaggcaaacctgtgatgcaggtttgcctttttgagaaggagaaatacctaaggccagaaagttgtttattctttctgaacttaggtattttgtttgttatcatgtacatagaaataaaaattaataattttttacaaaagtgatagaaaatgagaatgaaatgccaatagtaagtaaaagcggcataatagccgctttttatcgttttatttagtatttgatttgaaatattttccttatgaaagaaagattattgctaattgtaaactgtcaataaagttatttaagttttgatatggaataccccgccggaaaatacagcaataatttcgtttgaacatatctgttattgcacgatctaaagcatcttctataacaagttcaaactttcaataagaagataaccccctgtacaacttaaaagaatgtacgtaaatattttaaaaatccgttgattaagccatttaaaaataatttgacctataaacaaacctaaaaatacaattggaatggcataaaaacttgattcccaaatggttttgtttgtgccagtaaagagtatttgagttactagactaatgaaatatataaacagataaaaagctaatgtagttgctcttaacttctctttttcagtattagttcctgtaaaataaagtaacaggggtggacctggcataccgatacttgtcgttaaaagaccagataatccgccagctatgaaatctctagattgtgttgatttaaccttaacgttgcatattagcaacaatgttaatagtaagagtaggatgctaactgctaatttaaaagtgtttatgttaacggaaatgaaaattaaaatgccaaaaggaacaccaactatacttccaaaaataaaccttttcagtagaacaaaatcaacgtccattcttattttccaaatgagtgaaatggagataattaaagataaaataatgtttatttgtatagcttcttgtggtagaaataacataagtaagaaaggggttgccattatggaaaagccaaaacctgtacttgcttgcagaatagaagccactaatataatacatatgaaaaagaatgtgatacccaaaacagccctcctatttaatcaagtttaactagttaaagtctattatttaagtgcaatgtttcacaaacttatttgtattttaacataaatatctagttttttctcaaatagtgttgccatataaggctctttaactaaaaaatctgacttgtatttttaaacaattttattatggggaaacaaataatgaatgggatcaaaatgtattgattatcattaaattattcactgagatccccgcgataaaacaagaacagccatataaaacttacaaaaatacagcatgtagctaataaacagccaatcatttgaggagaaagaatttctaacagccctcctgtaaaaaacatcgataactgaataagagatccgtaaatggaataatggaatgaaaaaactttacctatcatattttcgtgtgtgtaagtttgaagtaatgtcgtatcaagtggaacgatgattcctcctgctatgcgcatacagaataaagtaatgataccgataataagttgatcggatagaatgaatccgagaaagaaagttccttgtaataagtaggcccaaccgaatacttttttcattttttctttattatgggatatataaagattaacgagaaggcttcctatcataagcccagccccttgaaccgtatataaaatcccaatgttcgtatggaaaattttttcggcatagatcgttagaagtagttgataagcacctccaataatcccccatgaaatgccgacaagaattaatgttaaaatgatttttgtttgtaatatgtatgtataaccaccttttatatcagtgaaaaatgctttcttcttgttacaagtatcatgagcaggaatactcatgttataaataaaataggctgaaataaagtatgataggctatttactaaaaaagcgaactcaatatgtaaagattgtgcaattactccgcccaaagaagcccccataatagacataaaaccattaattgtactagaaagagagttagcagttacgaaatgattttggtgtacgatattttttagggttgcttgtttagccggttcaaataaacaagaaagtacagataaacatatattagcaatgaaaataatctcaattttatagcctgcgagtaagtatgtaaggactagaattccccgtgtaatatcggtaaaaatcataatattctttttagagaaacgatctacaattccgcctatgaatggactaagaagaagctgtggtaaacttttacttataaaagtaagtgcgatcataaacggcgattccgttatgctgtagacaaatgttaataaagctaccgtatggaaccaatccccaagtacacttaatgtttgcccataaaatagtttattgaagtttttatttgttttaagaagtgtggaataagaaactgacataaatagattaatccttatgtaatgacgatgtttgaatttgttctttccactcacttaaatacactttttccgctgtgggaagtccaacaggtaattgtgcaatcaattctaaactatttccatcagggtcgttaaagtatacggctgcatgtgctaattccggaaaaacaatcggttcaattggttccattccaaagtcttttcgtgctgaaattcctttttgatttagccaatgaatcgcattttctaaatcatgtaaacttacttgaaaggcgatatgtcgtaaagaggggtgataattcactttgtattctgtgccttcccaaaggccgagccaactctcattttctttaatccaaaagaaagcaatattatctcctcttttatataattttagccctagtgattcataaaaaggtattgatacttttaagttgcggacaggtaaatgtgcttcgtaaagacctctaatcattgtaatcccccttagtaaaaatgtttcttattccatagtaaacaatatgttgctagttgaaatcgcaaataagagggatataaattcatacgaaagtatgaaaaaaacagctcatatttgagctgtttttctatagtttttagttcatttttcaaggataggatatattaatatccgtatccgccgccaccccaacagctacatccgatgatgattagaaggatgaatagtacgataagcaaagcaaatccaccgccgaaaccagcgcaacttccaccataactcatatgttttcctcctttttagtaagttaatctatatggttcatggactactatatacagtatgttttttgtatagaaaacgagccagtctcatttataattagacaaatgcctgtagattcattaggattgcatgttagtgatttgtaaataaacctttacgtaattcataatttaggcataaaaaataaaaaattgtaaaaaaaaccattttcttatttttttatgagagaatatgtactataattttacaagtaatattatgggaaaagggagttttagtatagagatggagatgggacaattaaaaaataaaatagaaaacaaaaagaaagagttaattcaacttgttgcgagacacggattggatcatgataaagttttgttatttagtcgtgatttagatatacttattaataagtttatgaatataaaagacaaagtgcataaataaaaaatttatagttttttatattaagatgtttcacagaaaggagaggacagtaattggaacatttacaggaagaattgtataaacaaataaaagaagaaaaaggtacagttacaattttcttaaagagtggcgttagaataataggagaagttgttggagtggataaatttacagttttaatcttagtggatggaaaacaacagcttatttataagcaggctatatcaacaataatgaaataagacactcttgttgagtgtcttatttcattattgcttgcatgcctcaacatcaatgccggcagcaattaacttcttttctccatcttgttcaataattttttgtaatttagataagaaagaatcaaagtttgtatgctttgctacttggaacgtcattttatgttcaattggtagccacgtatcaatatcagcttcgttatgctgaatttttacctcaagtttatcgagtgcattagcaacttttgcttcgtacgtttctttcgcttcaaactccatccataagtcatataattcctcgccgagagaacctgttaacgtttgtttaatatttaaaatagcctccagttcatttttttgtttttgtagctgtaattcgtgactattcattgtatcaaaagcaggaatatcaccagcttcggcttcgactaggtcgtgaataataaccattttaagtaatttctcaatacttactttttgatccaaataaggttcaactaaaatggccattagagacatccgccatgtatgttcggcaacactttcttgacgtccgttggaaagccagctatgtcgcatttcatattttagtttttctgctaatgcaatgacttgtaaaatgttgtgttccatcgtgatcctcctcatttattcataccataattctaatatagaaatgaaatgtgtcaattttatgagtatattgcgataaacagatgataagcgtataatacatgttatatgtgaaaacgtattattaaaataaaaaaatgttatataaaaatggaaaggaaagggcagaaatatgggagagaaaaatcaagtattagctagaccacaaagaagaaaaaggaagtttgatatttctagcccagtgggcattatagtaggtttcattatagtgatagcggcaattatgcttggtggcggtggaataaaagctttcaaaaactttttagatatttcatctattttaattgtcatagggggaacaacagcgacaattgttgtggcatatcgatttggagaaataaaaaaatatacgaaaagcatttttactgttttacatagaagagaagaagatttagaacagttaacggatttgtttgtcgatttttcgaaaaattctaaaaagaacggcttgctttctttagaggtagatggagagcaagtagacaatccttttattcaaaaaggaattcgattaatgttaagcggttacgatgaagatgaattaaaagaagtgttattgaaagatattgaaacggaagtgtatgagttaagaaaaggagcagcattattagataaaattggtgattttgctccagcttggggaatgattggtacgttaatcggtcttatcattatgctccaaaacttacaagatacatcgcaaattggtacaggaatggcagttgcgatgttaacgacattatatgggtctgtacttgcgaatatgattgcaatccctcttgcggaaaaagtatatcgtggtattgaagatttatatacagagaagaagtttgtaatagaagcaatttcagaattgtatcgtggacaaatcccttctaaattaaagttgaaactggatacatacgtatacgaaacaaaggtaaaaaaggtaaaaggagcagcctaatatttcaaggagtggtatgatgagtaaaggaccgcaaaagggatcgcctcgttggatgacgacttttacagatttaacgatgttattattaactttctttgtattactagttgctacatcaaagcaagatgcagtaaaattgtcaaagatgcttgaaaagtttagtgatacggggcaagtagatgcaaaagtaatggaaaatacaataccggatatttcacatgaaaaaaatgatgaaaaaatgatttcaaaaaagagaatggatgaattatataagaagttaaaagcatatgtagataataatggtattagtcaagtgaatgtatatcgagaggatacaggggtaagcgtcgttatagtagataatttaatatttgatacaggcgatgcgaacgttaagcccgaagcgaaagggataataagtcaattagttggattttttcaatccgtacctaacccaattgttgtagagggacatacagatagtagacctattcataacgagaaattcccttctaattgggagttatcttcagcacgagcggcaaatatgattcaccatttaattgaagtgtataatgtggacgataaaaggctagctgcggtaggatatgcagacacaaagccaattgtaccaaatgattcaccgcaaaactgggaaaaaaaccgtcgcgttgttatttatataaaagagtagtatattattattttaataataaaataataaaaacacgaaaattcttttaaaaaaatattaaattttatcattttattttgtataatgagtgagaatgataaggtgaaatattaagatatatttatacatagaaggagagaattaaaaagaatggcacataaaattttagtagtagacgatgcgatgtttatgcgaacgatgattaaaaacttattaaaaagtaatgctgaatttgaagttattggcgaagcagagaatggggtagaagcaattcaaaagtataaagaacttcaacctgatattgtaacattagatattactatgccagaaatggacgggcttgaagcattaaaagaaattattaaaattgattcaagtgcaaaggttgttatttgttctgcaatgggacaacaaggtatggtattagatgcaattaagggcggggcaaaagactttattgtaaagccattccaagcggatcgtgtaattgaagctttaacaaaagtagcaaatagttaatatagaaggggtgccacaaggaatcaaaacagtgatagcggatcgacgtgtggcccccttttttctcattgtaaaacactaaattgttatacataaatgaaatgtttgttagacaggtaggggataaaaatgcaaacagatctattaaatatatttttcgaagagtcagaagaacatttacagtcgctaaatgaaaatgtgctagtgttagaacaaaatcctgctgatatggatgttgtaggagaaatattccgatccgctcatacattcaaaggtatgtctgcgagcatggaatttacggaaatggctgatttaacgcataagatggaaaatgtgttagatgaaattcgtcatggaaatatagttgtaaatgcggatattattgatgtgatttttgagtgcattgataatttggagaagatggttgcagatgtgcaacaaggtggaatgggcaatattgatgtagcctcaactaaacagaaattagaagcattattgaacggcaatgtagaaactcctacggaacatatagagcaaaatcatatagacacggatgatgcagtttcgcatgaagtgcatataacagttgaacagcaagcaattttaaaagcggtacgtgctattatgtgtattgaagcattgcaaaatgtagggaatatacaaaaaacagctccgagtattgaagaaattgaagcagatgctttcggatttgaatttacagtatttatggatactgattgtagtatagaagaattgaaacaagtagtacttcatgtttctgaaattgagaaagtggaagtaaagcaaggagaacctatatcgaaggaagtagcttctaaaaaagtcgttacacaagaagttgtgcaagtagaaggaaagctacaaccagctgtggctacgcaggtagaatcaccaatagagccaacgaatcaaccttcaagtgctatgccagctaaaagtactacaaaaacgaaaaatgctaaagtggagaatcgttcaattcgtgttcaattagagaaaatcgaaagattaatgaatatgtttgaagaaagtgtaattgaacgtgggcgcattgatgaattggctcaaacgattcaaaacaaggagctaattgaacatttaaatcgattaggcgatatttcaaaagatattcaaaatgtactattaaatatgcgtatggtgccgattgaaactgtgttcaatcgtttcccgcgtatggtacgtatgttagcgaaagatttagggaaaaaaatcgatttacaaattacaggtgaagatactgaagtagataaaattgttattgatgaaatcggtgatccgctcgttcatttaattcgaaatgcaatcgatcacggtgttgaaactgttgaaaaacgacgtgatgcaggtaaaaatgagacaggtacgattaaattagaagcctttcatagtggaaatcatgtcgttattcaaattacggatgatggaaacggtattaataaagggaaagtattagaaaaagcgattaaaaatggcgttgtaactgaagcagatgcgaatagattaacagatcgtgaagtgtttgatcttattttccaaccgggatttagtacagctgaagttgtatcagatctttcaggacgcggtgtcggattagatgttgtaaaacatacgattcatagtttaggtggacatttaattattgattctgaggaaggaaagggaagtacatttagaattgaacttccattaacgttatctattattcaatctatgcttgttcaaacgaatgataagcgttatgctttacctcttggaaatatcgttgaagcaattcgaattaagagagaagacatccaatccttacaaggaaaagatgtattaaattatcgtaatcaaattattgaagtgaaacatttaagtactgtatttggtgaaaaaacagtagatgaggcgtttgcgtcatatgatggtcaaatggttcctgtgttaattgttcgtaacacacatcgcagctatggacttattgtaaacacaattatcggtcaaagagaaatagtcttaaagtcattaggtgacttctttgcagagagttctaactatttctctggtgcgacgattctcggtgatggacgagtgatcctcattttaaacccagaaggtttataataggaatgaaggaaagctccccacttgtatacaattggggagctttttggctaatcgttacgaatctaataatgggatacatagtaacgttttatactaatgagtttgctaaaataaaataagagtttatattatttgatagaaaaacagaaatgaggaggcagggaaaatgcctgagcaacacacaaaaggggatacgagcacgattgtgctagaaaaagaaaatgagcatttaacgccccaagaatgcgatattcttggcgaaattgcaaatatatcatttggttcagcttcgactgtattatcaacaattttaaataggcaagtaagcattactgctcctcgtatagagttggtagatttatatgattcaagagatgtcgaagttccacatgttgtattaaacattcattttacaaaaggattagatatggaaaaccttcttgttcttaagcaagatgttgcattgtccattgctgatttaatgatgatgggaacaggtgaagtcgaggacggaaaagaacttggtgaattagagctaagtgctgtacaagaagcgatgaatcaaatgatgggattcgcagctacatctatgtccgaattcttccaagatacagtagatatgtctccgccgacgattaaagttgtaaagttatcagaagaaatggagaaaatctctgaaatcgatgggaatcatacgattgttaaagtatcgtttgatttaaagatagataatcttgtaaactctaaacttgtacaaattgtttcagttgagcatgcgaaacaaatggtaaataaattaatgcaattatctggtggagtagaagaaacagacgaaccagcagaagtagtggaaactgagattgtagaagaaaaaattgaaaaagagcatttaacacaagaagagaaagatgttcttggtgaaattgcaaatatttcaattggttccgcttcaacagtattgtcaacacttttaaatcagccagtttcaattagtacaccaaatgtagaagcaatcaatgttcgtcattatgatggagtaccagtaccatttgttattttaaatgtcgactttgttgaagggctaaagaatgagaatgtatttgtatttacgaaagatgttgccttaacaatggtagatttaatgatgatgggaacaggggaagttgacccagaaaaagagcttactgaattagaactgagcggtattaaagaaattatgaaccaaatgatgggtcatgctgctacggcgatgtcagaaatgtttcaagaaaaaatggacatgacgccgccaaatgttaaatttgtaacgttaaaagaagaaatggaatatttgggagagtcaatggaagtggacgaactcgttcaaattacgttcaatcttgaaattggcgatttgcttcaatcgaagatgtatcaaattttgccaatttccgaagcgaaagaaatggtaaggcgacttctgtatccgatggtggaagaagaagagattgccacagaagaaattgaagaagaaaaaattgtagaaccagttgtgcaacctattgaatttaaagaagtaaaacaaatggaaccagtatatatggacacgtccattctacaaaatgtagaaatgaacgtgaaatttgtatttggaagtacagtgaaaacgattcaagatatattaagtttacaagaaaatgaagcagttgtactagatgaggatattgatgaaccgattcgtatttatgtaaatgatgtattagtggcgtatggtgaacttgtaaatgtagatggattttttggagtaaaagtgacgaaatcactataaggcattgaaataggagtttgaactagtagatgaaaaacgtaaagttttttctaatgagttggctatgcatacatgtgtgcttgttcttccccttgcaaagtcaggctgaggaacaaattgagtcagatcaaaaaataaatgaagtgaatgtacaagaagaaaataaggaatctcaagaatcgtcagaacaagtggaaacgaagcaagatgaagagaaacaaaaagaagcagagcaacaagaagtagtaaataaacaattgaatgaaagaaagatagaaacagaacaaggaattattacagtaaataagccggagcttaaagttggcgaagaagtgcgaattgctgtagaaccaaatgtgaaaaacattcaaagcatgaaaggtatattgcagttacaaaaaaatggcgagcaatatgcgcaagaaagaatactatcttttgagtatgatgaagaaacgaagatctgggttgctaactataaagcaggggattttgatttgcaaggtgattggaatcttcagctcgttcaaagttacaaagagaatgagaaagaagagctcataaaaaatgaagtgaaagtcccgctcattcgtattaaaaatgaaacgccaactatagataaagaattgccaaagttacagaaagttactattgatgaagtaaaagagaacttagttgaacgaaaacagggagattctatacatatacgagtaaaagcgtcagatatagaatcggttgtaaaagaagtgcgcgttacattaaaagggaaagaaaataaagagctttcgtttttattagactacaacaagcatgatatggattggcaaaaagtatttgaaataacagaagcattgccggctggatcatacgaattacttgtagagataatagatgcagcaggtaataaacttgttgaagaaagtgaatataccatttctgttttggcgccaaaaaacgaagatgataaaaagatagaagagaaagaagataaattagataataaactagaaaatgaattagaagataagaaagaaaatgagaagcaagaagatttgaaaatcaaaaacccgcttccagaagaaaaattgccagttgttcaaattccgaagcaagatgagaaagtaaataagtttataaaagaaccgttgaaagagaaagaggaatttacttacgttataaaagagccgttcgaagacaacaaggaagtacataaggcgaaggaccaaaaagagaaaaataacaaacaagttgtctctaaaaagaaagaacaaaaagaagaaacgaaagacaaggaagaagaaaaaggtgaacagggagtacaagcttcggatgtatttactatcatgtcaggtttattcgtactgtttttagttttaaagagtaataaagaatggggctaattatttcatagtagtggaggcgcttaaatggagattaaacgtacgacaattgaagataagacgctacaaccattaaaacagcctgcagctatttcggaacatgaaatccagaaagaacgaaagcgtagcaatttagtgtttactggacagtctaaaattatttcgaaaaataatgaaataggtattttacttgcaagtttaagtgatggaaagattatgaaggaaatactttctaaagagatggatacggtgttacaactttttaaaaagttacatacattatctcaagaaggaaagcaatcagaaaaagtgtttgaacaagtaattagaagcctacaaggacttattaagcaggcgcacataaaagaacttcctttgttagatggaacatatgatttcgctgaagtacaactatcatttggtagaaaagtacatattcctttactagatgtaagtgcactcatctctagagtggaaagtgattcctcagaaggaaatataaatttgatggtaacggttattactgcttatataacgaaattgtctaacgaaacgattttaattagcgttacagaccgcattgctaaagatcgggatgtaagtgtatggagagcgcttgcggaaatgaacatgacacaattatcacaggcattgaaacaaacgatgcaagaacataaatggtctatgacgtttctttttctcttcatatggattgtcggtattattttaattcgagttatgtaaaagaggtcgtcactccattgtgacgacctcttttatattttttcgtagaagaatgtatcaaatcgctgaagattgtaacgttcgggtgttaaaatttgttccgtactaccaacaaatagtacaccgccttttcgtaaagaacgactaaatttttcgtaaagttttattcttgcttcttctgtgaaatatatcattacattacgacaaataatcaaatcataatttgtatcgaatgactgcattaaaaggtcgtgttgtttaaacgagacgttttgtttaatgttttgatgcaatgaatatagatcattctcttttgtgaaatgacgttctttcaaatcagtaggtaattcctttaacgaacgttctgtatattgagcgcgttttgcggtttctaaaatatgaaaatcaagatctgttgcttgaatttcaaaacgaaatggagctagatgttttgataaaattaaagagagtgtatatggttcttcaccagcagcgcaagcggcactccatacctttaattttccgctattttgttcgagtaattttggtagtgctttcgactctaaagtttgccatcgttctttatttctaaaaaactctgaaacgttaattgtaatatagtcaataaaatttaaaaataaattttgatcagcgcgtaatttgtttaaaaaattagtgtagttttcgaagccttttctcgaaatgaaagcatcgattctacggcgcattctatcttgtttatatgaagcgatgtccatattgaattgttgtttaaaactcgctataaaatgatcgtaatcttgttcaattatcatatttacaatgggcacaataatgatattgtgcctccccctttacatcatacgaattttttgttcaaagctttttttcgtttgcttttcatgtaatcctggtaaatcataaatgacagcatcaatacctgcttcttttgcaacatcgacagggatgacagatgtatgtttgtcaccattataaaaacagagaactaaatcagtgtcttcaataatttgtttaacaaaaaacatataatctgatcggtaaatggagtcagaaggatgatcaaaagcaacatattcggctccgtgtttttttaagtaatcaacgacttcttgaaattcatctgttattgcttgcaatggttgcagcgtgtaaaggcataaattttgagcgagtctttcattctcaacgaaaaaacgaagaacctcattttcaatagatttataacataatatgtaaattttatgtttgtgagcatagtcagttaaaaattttttaatttcttcttgatctaatgctgttaattgatttgaaccacaaaggaaaatattcatagaattgtgccacctcatgctaaattgtaacatatcttttataaaaaataactgcaaaatattactgttcagagtataattataaataactggattttacgattaagtttaggaagaaataaaaaaaataaataggtgatatatatgctacgttctatctcgcataatccaattttatcgcatataccgcctgctactcaaatgccgaaagaagcaaatgtcaggacaggacttgcattttcggataatttgcatgcagatccgaaaaaagataaattactagaacaaatggaagcgtttgtcgataatattggagaaattaaagagaaaattgaaatggaattaacgcttgataatgtaatggaatacaaaaatacagtaaaatcatttttgaatttttacgtggataatgtattgcagtataaagatgtcatgtctcgtcacccgcgttacggatattcacagaaaatgacgattgtgaaacaggcagaaatgggattgaatgaattagaagatgttatgaatttaattaatacgaaaacaggacatttagaaatgttaaatcaaattggagaaatccatggtttaattgtgaatttagtcttgtaaaaggaaggaagctatatgtacatacaattatatgaaaaactcgttattattcaaaaagcgtatgaaaatattcaagcgcttggagagcaaatatatgagaatttaaaaaataaaaatgtaaatgcagttcaaaagttgcaagtagagcaattgcagtacattgatggtttaaaagggttatcaagctcatttgaagaaatggttgttcagttctgcaaagaacaaggggttgaatcgtttcgtgtaagtgcgttattttcgtatttttctcaagaagaaattgaaaaaatggaagaattacaaaaaaacgtaactgaattagaagagaatgtaaaaatgattcttttgaaaaatcaatattacttaaacgtactattaaaaactacagaaagtattgtggattctgtttctgaatataacttagagcgaaacaataattcgcaaatctttatgaatgaactattgtaaaggagaagtgaagctttatgagattatctgattataatacaccgctatcgggtatgttagcggctcaaatggggttacaaacaacgaaacaaaacttgtctaacattcatacaccgggttatgttcgtcaaatggtgaattacggatctgctggaggaagtaaagggtatgcaccagaacaaagaatagggtatggtgtacaaacgttaggtgttgatcgtattacagatgaagtgaagacaaagcaatataatgatcaaatgtcacagttctcttactatgcatatatgaattctactttgtcgcgagtagagtctatggtaggaacgacaggtaaaaattcattatctagtttaatggatgggtttttcaatgcttttcgtgaagttgcaaaaaatccggagcaatcaaattactacgatacattaattgctgaaacggggaagttcacaagtcaagtaagtcgtcttgcgaaaaacttagatacagtggaagcacagacgacagaagatattgaagcgcatgttaatgaatttaatcgacttgctgctagtttagcagaagcgaatcataaaattgggcaagcaggtacacaagtaccaaatcaactattagatgaacgtgatcgtattatgacagaaatgtctaagtatgcagatatagaagtatcgtatgaagctacaaatcctaatattgcaagtgttaggatgaatggtgttttaactgtaaatggtcaagatacatacccacttcaattacagaaggataaaaagccaatgtctgtacaaatatctggaacagatatcccattaagtggtggaacaattttatcggcaattgatacgaaagcaaagattacaaattataaagataatctgaatgagtttgtaaattcgttaaaaaaacaagtgaataatactatgaagaaagagttttttgtaggagaagatgcgaagaagcttgaattgaatcctgattttataaaagatatttcaaaaatgaaaatttcggctgaaactgccaacaaccttgcggctattacagataaaggctataaggatggacttacatataagcaagccttagatcaatttttagttggtgtagcctctgataaaagttcagtaaatgcatatcaaaatattcataaggatttattagaaggtatccagcaagaaaagatgagcatcgagggcgtaaatatggaagaagaaatggttaatttaatggccttccagaagtacttcgtggcgaattctaaagctataactactatgaatgaagtgtttgatagtttgttttcgattattagataaggagtagtcatgtatagttggtaattggaaatatttaaggaggagatagaaatgagagtatctacatttcaaaatgcaaactgggcaaagaatcagttgatggatttaaatgtgcaacagcaataccaccgaaatcaagtaacctcagggaagaaaaaccttcttatgagtgaagatccacttgcagcaagtaaatcatttgcgattcaacattcattggcaaatatggagcaaatgcagaaagatatagcggattcaaaaaatgtattaacacaaactgaaaatactttacaaggtgttttgaaatctttaacaagagcagaccaattaacagtacaagcattaaatgggacaaatagtgaaaaagaattgcaggctattggtgtagagattgatcaaattttaaaacaggtcgtctatttagcgaatacaaaagaacaaggtcgttatattttcggtggtgatagtgcaaaaaatccgccatttacagaagatggtacgtaccaaggtggaaaaaatgatgtgaactggcaattaaatgacggttatgaattcaaagcgttccgtaacggagaagcattattatccccggttataaaaacgttaaaacagatgagtgaagcgatgaaaaacggtgaccaaaaagcattaaaaccgttattggaaggaaataagcaaaacttagatggcatcattaaccgtacaactgaagttggttcgacaatgaacacaatggagacgtttaaaacaattttaaacgagcaaaatgtagcacttcaagaaaaccgtaaagaaattgaggatgttgatttagctgtcgcaatttctgatttagcttatataaacgcaacatacgaagcaacattaaaagctgttagtacgatgagtaaaacgagtattttagattacatgtaaatgataaggagtgaaaaatatggcagggacaatatctaattatggtgacagacagcaaatatggaatttaggaaataacataatagatacaaagaagttagtagatttagagttacaagcattggaaatgaaaaaatcaccatacactacacaaaaacaaacgttaacaaatgaaaacaaagtttatgcgagcatgaaaaaagagtttgcaaattttgtgcaagtattcaaagatttaaacacatttaaaggtgatgaaaagaaaacaactttatccaaagatggttttatgacagcacaggcggatgctgctgcaattcctggaacatatacaattacagtagagcgagtagcagaaaggcatcaaataactacagctccacttactcccccaaaaactcctgaaggtacggagcaaaagtttagtttagatttaaaacttggagtagatgatgtatttcagataaatggaaaagaagttaaaatctcaaaagatatgacgtataaagatcttgtcaataagataaataatgggaattatggtgcatcagtatacacattaggggatcaactatttttcacatcgactactgcaggagaaactggagagctgaaattaacggatggcgccaatggttttttacaaaatatagggttagttacttctgcgaaaaatccggatggaacgaatgttgttgcacatcaagtgacaggagcgataaatgctgagtatacaataaacggaattaaaggaactagtaaaacaaataagattgatacaattccaggattaactattaacttagaaaaggtaactacagagccaattaaattaactatcgaagattcagatataaaaaattcgatagatttaatcaaaaaaatgaaagatgagtataataacgctgttaaaagtttagatttattttctggtgaaaatggagtaatgcaagggaataatgtttcatttgctatcagtaatgcaatgacaagcatttttaaattttcacaagatgataagtatttattttcttttggaattcaaattgataaaacaggaaatatgactcttgatgaagaaaaattgaaaatagcttttaaagagaatccagaatctacaaaacaatttttctttggctttaatggtattggtcatgatatagataaaaagcttgagggaatctttggagatgaagggattatcggaaaacgctctaaaagtattgaaaagcaagtgactgatttagagagaaaaattcaagatattgatacaattaataagaaaaaacaagaatcaattattgataaatatgcaaagttggaaagccagctagcattgcttgatagtcagctgcagacaatcaaagcaatgacaaaaaccaaaagtgatgattaatgaaagttgaggaagtgattatatgcaagcatggcaacgttatatgcaaaatgatattatgacgagtaatccgattaaaaatacaatatttatttatgaaagatgtatcgtagagtttcgtaaattagaagaacttttaaatacatttaaacttcaagaaggagacgaccttcttgaaaagttagaacgtatatttgaagagttgaagcttcaattaaatcctgatatttcaaaagatttatatgacggtctatttggtttatacgattggattagcattcaaattcaaacgatgaaagtaacgcgtgaagcaaaagacattgatgcgattgtacaagtgttacaagatttaatagacggttaccgtggagcacttgaaaatgaacaatgatatttatcgaacgtttgtcagctgttttaatgaaatcggtgaattacaagtgtcagatgaagagtttgctgagaagagtgagatgttaaatcgttggatgatgacactagatgaagaaagacgtgcacaagttgcagcagaagtaagcccattcattattaaggcagcgcagcatattcgtgataagcaaaagattttggaagaaatgattatggaaaatgatgggcgaatgaaggctaattcattttacggtaaatattaataataacgtctggaaacagattccccttttaaaagggggtctattccttcgtttacataaagaactccgctgattgaggtttcattttatgactgtgatgaaataataattgtaatctaaataatagaaaaatggactttagtttgtagtttatatattgaaatgttctatagattactatgtgtatacagttttttgcattctttttctatatttttgtatttttctaaagacaacaatgaaaaaatggaataaaatatgtaagggtacataatagtaaatattttaataaacgcatataagaaaataaataatgaagtgaaacttctatcagtggatcattacgttagaaaaggaagggtgtggaatatgccagatttagtgagtgatgtaagccattatatgaattatttagtgacgaaacgaaatactgtttctagtaatattgcaaatgcgaatacacctggctataaagcacaagatgtaacatttgctgagcagatgaataaaagtagtgcgttatataaaaataatgcggctgatttaaagagcaatccagatttatatcaaacgaatgaaatgcacttaccgacagtaaatacgaaaaatacatatgcaaagattcaaacaaaatcaatgcaaacgaataaagacggaaatagtgtggatgtaacgacagaaatgctagatttaatgaaagcaaatcagttatacggtatttcaattaacgcaattaatacacaatatgcaattaaccaagcggcacgcggacgttaaaagtagaaggagagacaacggatgtttcaggcaattaatgcaagtggctcagggctaacgacagcgagaaagtggatggaagttacttctaacaatattgtaaatgcgaatacgacggcggctccgggggcagatttatatgagcgtcgtagtgtggtgctagaatcaaacaatagttttgcaagtatgttagatggggctcctactaatggagtaaaaataaaaagtattgaagcagacaaaacggaaaatttagtgtatgatccgacgcatccgcacgcaaatgaagaaggatatgtacgttatcccaatattgatgtaactgctgaaatgacgaatgtaatggttgctcaaaaaatgtatgaagcgaatacgagtgtattaaatgcaaataaaaaaatgcttgataaagatttagaaatcggccgaggataagggggaagataataatatgaaaatccaaccaatgttacatacacaaccatttggagcaattcagtcaattggtgcaccgaagacttctcaaacacctgtagttgaggggaaaaagtttattgatttattggaagatatgaatcaaacgcaaaacaatgcgcaaacagcagtatatgatttactaactaaaggggtaggagaaacacatgacgttttaattcagcaaaagaaagctgaatctcaaatgaaaacggctgctctcgtacgtgataatcttattgaaaattataagtcactaattaatatgcaaatttaggaaagtggacgggtgtgtttaaatggaaaagatgaaaaatgttatccaatcgttaaaaacatggcataagttagtaatcggtgctgcgcttttagcgattgtaacaggagcacttttatacttcaccttgccagataaatatgttgttgtatatcaaaatttaaatgatgcagataaacaagagattacagcagaattatcgaagttaggtgtcgattatcaattagcggccgatggttcgattcgtgtgcaaaagaatgatgctccatgggttcgaaaagaaatgaatgggatgggcttaccgtttaattcgaaaagcggtgaagaaattttattagaaagctcgctcggttcaagtgagcaagataaaaaaatgaagcaaattgtcggtacgaagaagcaattggagcaagatattgtaagaaactttgcgacagttgaaacggcaaatgttcaaattacattgcctgaaaaagagacaatttttgatgaagaaaaagcaaaaggaacagcggcgattacggttggagtgaagcgtggacaattgttaacagctgatcaagttgcaggtatacagcaaatgattagtgcagcggttcctggtgtgaaagcagaagaagtaagtgttattgatagtaaaaaaggtgttatctcaaaaggagcagatgaagcacattctagtagttcctcttcttatgagaaagaagttgagatgcagcaccaacttgaaggtaaattaaagcaagacattgatgcaacattaatgacgatgtttaaaccgaatgaatataaagtgaatacgaaagtatctgtaaactacgatgaagttacacgtcagtcagagaagtatggtgataaaggtgtacttcgtagtaaacaagagcaagaggaaagctctactgcgcaagaaggggcagatacgaagcaaggtgctggtattacagcgaacggtgaagtgccaaactacggtacgaacaataatcaaaatggtaaagttgtctatgataataaaaatggtaacaaaatcgaaaactatgaaatagataaaacagttgaaacaattaagaaacacccagaattaacgaaaacaaatgttgttgtatgggtagataatgatacgctagtaaaacgtaaaattgatatgacaacttttaaagaagcaatcggaacagcggcaggacttcaagctgatccgaacggtaactttataaatggtcaagttaacgttgtaactgttcagttcgatcagccgaaagccgaaaaagagaaagagccagaaaaaagtggtatgaactggtggttattcggtggaattacagctggcttattagcgattggtggcctagtatggttcttattagcaagacgtaagagaaagaaagaagaagaggaatatgaagaatacttagtagaagaggaaattgctgcaagtaatgaaagtatcttggaaattcctgaagaaaaaatagtgccagagccaaaacctgaaccagaagaaccgaaagaaccaacgttagatgaacaagtgcaggatgctacgaaagaacatgtagaaggaactgcaaaagtaattaaaaaatggttaaacggacagtaagggaggaacaacgatgttagatgaaatctcctccaaagaaaaagctgccatccttattcgtacattagaagaaggggtggcagcaaaagtcattgaatatatgacagctgaggaaaaagaagtattacttcgtgaaatcgcaaagtttcgtgtatacaaaccagaaacgttagaaaatgtactaggagagttcttatatgaactaaatgtaaaagaattgaacttagtcactccagataaagaatacattcgtcgcatatttaaaaacatgccagaagacgaactggaaaaattattggaagatctttggtataacaaagataatccgtttgagttcttaaattcacttacagatttagagccacttcttacagtgcttaatgatgagtcaccacaaacaattgcaattatcgcttcttatattaaaccgcaacttgcgtctcaattaattgagagattgccagatcataagcgcgttgaaacggtaatgggtatagcgaaactagaacaagttgatggtgagttaattaatcaaattggtgagttgttaaaatcgaaattaaataatatggcatttagtgcaattaataaaactgatggcttgaaaacaatcgtaaatattttaaataatgtttcacgaggtgttgaaaaaacagtctttcaaaagctggatgaagtcgattatgagttatctgagaaaattaaagaaaatatgtttgtctttgaagacttacttggtcttgaagatcttgcgcttcgccgtgtattagaagaaattacagataacggtgttcttgcgaaagcacttaaaattgcaaaagaagaaattaaagagaaattatttacatgtatgtcttcaaaccgtaaagagatgattctagaagaattagatggcttaggaccgcttaagatgacggatgctgaaaaagcgcagcaaacgatcactggtacagtgaaaaagctagagaaagaaggaagaattatcgttcaaagaggtgaagaggatgtccttatttaaaaacagaattccgaagaattctgtttctttttctgaagaaacgtatgaattacaatttccaaaaccagcttcaattcaaatagaagaggaagaattacaagctgatcatgcagaacttcgcgcccagcaagaatcgttacatatggaaatgaatcagctaaggcaagagaagcaaatgctagaacgagagcggcagcagttattacaagataaagaacaatttcaaatgcatattcatgagcaactggaacagatggaagcagcgcgtgtgcaatttcaaaaagaacaacaagaaacagcgtatgaatggacagagttattatgggatcaatcttttcatctagcagaaaaaatcgtgaatcaagcggtagattcacgattgcttgatgtgttacctattttaactggcatcgtgcaaacattgccaacttcgtttgaaaaattaatcattacagtacatccagaaacgtttgaacgtattcaagaagagaaggaaaatacgaaagaatattggttactacaattagtagaatggaaatatgatttctccctgcagtttggtgaatttgttctggaagaagagaaagagttctttaaatttaaatttgcacctatatttgcgaaacttcgtcagaaatgggaagaagagaagttatttgaggagcaaaatgtatgagccgcctgttaatgaatgagaacgaaaaatggaataagttcattgaaacaccgctgtatacgaaagtaggcaaagttcatagtgtacaagaacagtttttcgtagcaaaagggccgaaagcgaagattggtgatgtttgcttcgttggagaacataacgtcttatgtgaagtgattgccattgaaaaggaaaataatatgctacttccatttgaacagacagaaaaagtatgttatggagattcagtgacattagtttcagaagatgttgttgtaccacgtggtaatcacttgctcggaaaagtgttaagtgcaaatggtgaagtgttaaatgaggaagctgaaaacattccattacagaaaataaaactagatgcaccacctatacatgcatttgaacgtgaagagattaccgatgtatttgaaacaggaataaaatcaattgattctatgctaacaattggtatcggtcaaaagattggtatttttgctgggtcaggtgttggtaaatcaactttacttggaatgatagcaaaaaatgcaaaagctgatataaacgttattagtttagtaggggaacgtggccgggaagtaaaagactttattcgaaaagagttaggcgaggaaggtatgcgaaaaagcgtcgttgttgtagcgacgtcagatgaaagtcatcttatgcaacttcgtgcagcgaaactcgcaacgtctattgctgaatacttccgtgatcaaggtaataacgtattacttatgatggactctgttactcgttttgccgatgcacgaagaagtgttgatattgctgttaaagagttaccgattggtggtaaaacactgttaatggaaagttatatgaagaagttgttagagcggtccggaaaaacacaaaagggatctataacaggtatttatacggtgcttgttgatggggatgatttaaatggtcctgtaccagatttagcacgtggtattttagatggacatatcgtattaaagcgtgagcttgcaacgcttagtcattaccctgcaatttcagtattagattcagtaagtaggattatggaagaaattgtttcgccacatcattggcagcttgcaaatgaaatgagaaagattttatcaatttataaagaaaatgaattgtattttaagctaggaacgattcaagaaaatgaagaaaatgcttatatttttgaatgtaaaaataaagtagaaggcataaatacatttttaaagcaaggtcgatcggatagtttccaatttgatgatatcgttgaagcgatacagcatatagtataaggcctctgcataagaggtcttatttttttgttttttaatatttcacagatttttttggaaaaaaactatataatagaaaaagagaacgttataatagaaaggggttatgaaaacaggtggataaacagcagtacgacacaataaaattgcaaataaatcaagaaaaagaacatattttaaaagaagtgtatgaattaacagctgaaaaaagaaaaatagaacaaaaaaaagaatatgatttatatgttgtgaaatcgcgtagtaaagtcgtacaaactgggcaacgtattatggctggtatgctttcttcacatacgttttcacctgaaagaatagaagaatggaatcggaaaattaaaaaaacggaaggttttattcaaaaaaatgaaagtcttttagagcaagtaaaagaaaaagaacgtgtcattgatgagatgtatcaagaagattgcaaaaagcttgcgaaagcacaagaaaagctggaagaaaaaatgcttctggatttgaaaatgtgtatgaatggatgaggtgaatgtagtgatacagtctgtattaccggtgcaacaaagtttacctccgcaaaaagaaaaagggctagaagtacaatcgaaaaatgaagattcttcatttgatcgtacgatgagaatggaaaataaaaagcagccgaaaacggagaaaacgaaacgagaagaagcaccaaaagaagagaaaaaagaatataacctttctaaaccatcggtaacgaaagaagaaccaattgtaaagaaagaagaaaaaaaagagacagaacagttgttattagctgtatctgagcaaatggttgcaattgagcaattacatgtgcagccggaattgttatatcaatacatacaaaaaatacaagagctatataaagaatatggcaatattaaacttaatgaattacctgcagctgaattacaacaattacaagaacttctttcaaatatgaatatcaaaaatgctatatgtttagaagatacaatgcaaatggtattagacaaaatgaagatgccagagcaaacgatgcaagcattgaaggttgtagaaacagaaacttgtaatattgcaaagaaacaagaagaatttaaagacgtagatcttccgaaagctgagaacgatggtgcaaaggtagagttgccagaaggtgatgcattaaacgattcgagctctgcaggtgcagagttattaaataaaacgacgagtaccgaacaaatagggaaatcaaatagtggtgctgagaaagtttcattgcctgacttaggaaagaaaatggaagcgcaagtagaagccttgcaaaaatttgtagtgaaacaagaacgtgttttatttcagttaaatccagaaaaatttggtacgttaactgtgtttatgaaaaagcatggagaccaaattgatgttcacgtagaaatggaaaaacacgatgcgaaaaaacgtgttgaagtcatttttgatgaattgaggctaaagttaaaagaaaaagaaattaacattcaaattagctattctgataaagatgaaaaccgtaaagaacagcgagaacaagaacaaaggcaaaagcagaaattagcaagtacgcaacatgagaaacaacaatcaaaagaatttgcgggattattggaggaataaagtgtgccaacagttggattaaatacaacgagtacaaatcatattccgttacaagtaggggcgcaagcaaaaaatgcatctgttaatggtgtgcaatcgccagttcaacaaacaaacggagtatcagcaagtaatcaaaaaacacccggtattatggataaagatgatttcctgaaactttttttagcaagctttcaacatcaagacccgtttaatgcgatggatatgaaccaaatgatgaatcaaacggctcaactatcgcttatggagcaagtacaaaatatgacaaaagcagtagataaactacaatcaacgatgtatacgacagctcttgatggagggatgaaatttttaggaaagtatgttagaggtataaacaataagggagagcaagtgactggtcaagtggaaactgttcgacttgccgaaaataacgatgtacaacttattgttgataatcaagttgtctcacttcgttttgtagaaagggtttcagataaaccgatagcagaaacaaatccagaagatgagaagaaagatgatatagaaaaaaatgaagaggttaagcaaaattaataaaaattaataaaaattaataaaaggagtgtatataggttatgattaaagcgttatatacaagtattacagggatgaatgcggcacaaaatgcattaagtgttacttcaaataatattgcaaatgcacaaacagttggatataaaaagcaaaaagctatttttgatgatctgctatataataatacggttggttcacgtggggatggtgcttatgctggcacgaatccaaagagtattggtaacggtgtaaagtttagtgggacatcaacagattttagtgatggttctcttactttaactagtgataagatggagacagccatagagggaaatggtttatttttagttggcgatcgtaatagtggaaatgtagagtatacgagaaaagggtctttcggtgtatcgaaagataactatgttacaaatacaagtggacagtatgtgctaggttatggtgtgaaaacaggaacacaagaaatagatttttcttcacgaccaagtccaattcatattccaatgggatcagctgttggtgggattcaaacagataaagcaacaataggtggaaaccttcctagaaatcaaaatgcattatctcacgaattcacagtttttgatgaggaaggaaactcgttaacgttacgtgtaaatattaaacaaaagactacaaaagagactgtagatggaaaagaagttgaaaagcctgtgccaggtgaatatacatatacagtttctgtaagaaatgattctaaaaacgaaaaagagtttaagcctgttgaaggcatgacgggcgaaaaaaatcttaaatttgatacattaggaaatctaaaagaaacagatgaatctgtacaaaaaaatccagtaactggtgaaattactaaaggtggaacagttaaaattccttttggtaagggactgacactggacttaagtggtttaacaaattatccgacagggaaaactatttctacaacagaagtaacggggcgtccagctgcaattgcaaatgactattcaatttctgacggtggtttcgttatgatgacatattcggatggtagtatgaaggttgtaggacaactagctgtagctacattccctaattcaggtggattaatgaaaactgggaatggcaattacattgccacaccatcagcagggattccagggataggtgttgccggtgagaatggtgcaggtaatgtaagggggtcagcaaaagaaagttcaaacgtagatttatctgcagaattcgttgacttaatgctatatcaacgtggattccaaggaaatgcgaaagtaattaaagtttcagatgaagtattaaatgaagttgtaaatttaattcgataatatattataaagaaagattgtaatgtagtagaaagggtttttattcgtatgacaagacaagaacgaattttacaattgccatttttcgagaataaacgtgaacttgctgaacaagtactaaaaatggaacgagaagagcatatatatttaccagatcaatttgaaattaagcaagtgcccccgtattcatttgctgaaaagaaagcgattattggtcgtattcatgagttttatttcgtcagtgttggcagtgatggcgcatggaagtatcaactgtttaaggacgagatgaagtgccgtgagttttttattacattatcaggcattacggatcagcaaattgcgttttggttcaacaatatcgagttgcttaaaggcgcttaaaagtgtttttaggcttaggtggctcggagctgtaagaagagaactataaaaatgtactggagtggttgaacaataatctctttatagcaagtcagtactttttatagtctgtgagttgtgacaatagggcaatgaaatgagagtatgctagtttcatttcatatgtttgtgatgatagatttttataaaaggagaggtgaggaggatggcgcaaaataagtatcgcgttacattcatttcgccgagtgaggttgagcagcggactgtaatggcggcgaatagtttgccagatttaattcgtaaagtagagagtattattgcagatccaaacggttattttgtaaatgataaaaaaaataattgttattttaaagtgattaaagaaaatgttacgtttattcaatatgagttactattttcggataaggaaattcatattgaaaaattaaaacatatagcaccggtggtattcaaacgattattcgaaaaaataaatgaaccagaactatatgcactcgcactacttgatgttgatatagcaacgaaagaatatgtgctagcagaaatgaattctgagctgagaataagagtagagacggagctttcgaaaaaatgggaagcaatgccgacagaaattgtaggggcgcaagaagtgttattagaagcacttgcttcgtttatacaagattaattgttttttaataaaatgaattgatcgactatctatattttttatataggtagttgactttttctcttttataaagcttaataattagatatacggaattaatggaaggggagcgacacctttatgtcacaagcacaaagtattttattagaaagcggaacaaatgaattagagattgttacgtacactgttggtgaaaacctatttagtattaatgtaatgaaagtacgtgaaatcattaatccattccctgttacaactgtgccagaatctcatcatgcagttgaaggtgttgttcaagtacgtggtgaaattttacctgttattaacttggcaatggctcttaatttaaagtcaacaaagccacttgatcaaacgaaatttatcatctcagaattaaaccaaatgaaagttattttccgcgttgatgaagtgcatcgtattcaacgtatttcgtgggaacaaattgatgaaccagcttcattatctatgggactagaagaaacgacatctggtattgtaaaactagatggcaaaatcatcttactattagattatgaaaaaattgtatgtgaaattagcggtactggttatgacaataaatcaattgcagggttagaacaaaaaacagatcgagctgaaaaagtaatttatattgcagaagattcagcgatgctacgccaaatattagaagaaacattatcatcagctggatatacgaaaatgaacttcttcagcaatggtgcagaagcgttagcgcaaattgaaaaattagcgaaagagcaaggagagaaaatgtttgaacatattcacttgctaattacggatattgaaatgccgaaaatggatggacatcatttaacgaaagtggttaaggatagtgaagtaatgaatcgtttaccagtcattattttctcttcattaattacaaatgaattattccataaaggtgaagctgtaggagcaaatgctcaagtaagtaagccagatattcaagagctaattggtttagttgataagttagtgttgtaagaaaagcacttttttagctggaatagaggaactagctatgtgtggcagcggtcagtgcctaatagagacccatgcgatgtaagaccagagatatggagtgttttttaggtaaatgggacgagatagccgccgagatagctttagaagaagcgagacttcgattgaggatttgaagactgggtttataactctattctgttagagagaggaaggaattagccatgtgtagcattggctaattcctttttagtattctatactttaagctggcagaaaaatgaaaggtttctgaggtgtttggcgctgtatgtatgaaaaatcttcaaatgaagatttttgatttgaaaatataagcaaacgtattttgagggttattttagtaacatttcgtggtaacgcaaattttttcggtgaaaaaacatccaaaataccatataatataattaaatgtaattaatatgcaattttacatattaattaaaaaacattttccaaatttttatactttctatacatttttgtatgtttattatttgacagataatttcgaactgttataatatggatatgtaaaaattgctattttcttaaaagacatgggagtcagatgagaattgtgaaaggatgagggggagtggcacaaattatgtatcaccacacagcaattaatgtattaggtcttttacaaaacatgtcaaataataaaatgaacgatatgcaactagaggcggaattaaaaaaaatagaaaaagaattccaagtaaagtatgaagaattagttgatttacataatagaatggtattattccaaatagatatagaaaaaaatggcgggatgcgagcatatgaaaaatcagcaattacatggctgaagtctgaactagtgctactgtatgaagtgtatcaattttgtcaacgtcacggtttaaacattttaaatatttcaaaatacgtaagtaaaaatgaactaaatctttttccaaaaacagaaagtcaattgcaaaatacgtattataaattaaaaaaacgtgaaataccgtttgaaaatattgaaaaacaaaaaccaggacgaaagcgaaaatatataccagtaaaagagacaatcgttgcaagaaaacaagaaaacgagtacgaattaaaagaagaaatccagcataaagaggatgaaaaaaatcttgtaacagttatatctggtatcgttgataactttgaaacaattaatcaatgtagtgaaaggaaagaagacgaactacatcagtttatggaaggtatttataagctttctagcatggcagcaggacgttctagagaagcaaagaatacacgtagtctagaaggtgaattgcagtcgttacaactagaaaatgaaaggctaaaacgagagaaagaagagcttgtacaagatattaaaggcatgacgcagcttttaattcatttcattacaagttctgatatcgatcaaattcgtaaattaccaactttcgtacaagattgtaaaatggaattacataaactagggctatataatgcacaagacggtaaaatgaaaattatggttgatcgtagtggacaggttatgactgtcacgcagtaataaaatttgggtacaaaataaaagggaggtacatagtttatatgtatttcccttttgttttgtatggaatcgttccaaagatggaagatgaatgtttatgattgtagtagtctagagaccatttgcggaatttggttcgcttgtgaaaccatactaagtgcaacttcagtcaataatttgaactttaaaaaatcactcatctcctgcgccatgtctgcatcttcaacttgagatgcagcatctgttaacgccatactttgactatttaaattttcaatattaaattgtaaacgatttatcatagcaccaaggtcggcacgatgaagtgacacactttgcaaagcatcttcaattttaagaatcgccgctcttgcttcttgttctgttgaaatcttaatgtcatgttgtgtaggggaagggggaatatgtttcatcatatttattgtatgaccgatatcgtctaatgtaatagggcggttttgaccgtcaaatacagataaatcattaaactcagtcgtctcgccaatatagccaatttgttctgttaaagactgaaactctttattcagcgagtcacgatttttatttgaatttgtaccattcgcagattgaacagctaaatcacgcatacgctgcaaaatatttgacacagtttgaagagcagcttccgccgtgcgaagcatcgatatcgcatcctcattattacgaatcgccacgcgcataccacttgctctcgcgtgcatacgagtcacaatcgcaatattagcgggattatccgaagcgttgttcaacttcttaccagtcgccaaatgctccattgcaacattcatacgtttctcattctcatacaacgactgcctagcattcatacttaaaacattcgtaccaatacgcataatagacactccttatagattgatagagtcggtatcttttgatctaataaacagttatggaaggatagaggggcttatgcttatttactgtttgtgttttaacataagagggaatcaagataaaagcatcacggatactctcttccacataaaaaagaaagttttataaataatctatctatatagaaaaaataaacctctctgcaagcagagaggtttattcaggaaactaactcaaatggcttattgtaataatttagaaaccatttgtggtgtttggttagcttgagaaagcatgctgatgcctgcttcgtttaaaattttgaactttgtcatgttagacatttcttttgccatatcagcatcttcaatttgagaagcagaagctgccatattagtagcttggctcgttacgttgtttaagttatggtctaaacggtttaattgagaaccgaaagttgctctagcgtcagcaatttcttgaatagcagtgtccagagccgtgatttcagttgctgcagttgtagcatctaatttctttgatccatcagttgaaactgctaaagtaccagttgttttaccttttgtatcgatagctgtgattttcattgtatcatttgaagcgtcagaaagctgaattgtgatatctttcccaccagcaccacctaaaaatgcgttaccattgaaatttgttttatcagcaatatgatcaatttcttgtgctaatgcttgatactctttgtccatagatgcgatatctttatcgttgttagtaccgcttgatgcttgtgttgcaagatcacgcatacgaagtaagatgtttgaaacagaacctaatgcagcgtcaccagtacgtaaagcagacatagcgtcttgtgtgttacgtgccccaacgtttaatccgccttctttggcacgcatacgagtagcgatagctaagccagctgcatcgtcagctgcactgttgattgatttaccgctagataaacggttcatagatgtattcattttgtcttggttttgtcgcatgtactcttgagtacgcatgctgttaatgtttgtattaattctcatgttaagaacccccattaatttttaattatttaaaagaaaactctttatatactacagagagtatatgttcaaatggattattgtaataatttagaaaccatttgtggagtttggttagcttgagaaagcatgctgatgcctgcttcgtttaaaattttgaactttgtcatgttagacatttcttttgccatatcagcatcttcaatttgagaagcagaagctgccatattagtagcttggctcgttacgttgtttaagttatggtctaaacggtttaattgagaaccgaaagttgctctagcgtcagcaatttcttgaatagcagtgtccagagccgtgatttcagttgctgcagttgtagcatctaatttctttgttccatcagttgaaactgctaaattagcagttgttaatttctttgtttcgatagctgcgattatcattgtatcacttgaagcatcagaaagttgaatcgtgatatctttaccctcatcaggattagtacctttatttaaaaatgcgttaccattgaaatttgttttatcagcaatatgattaatttcttgtgctaatgcttgatactctttgtccatagatgcgatatctttatcgttttacaggtctctcatgaaagtaaaaaaattaagtttaaacatactatacgaggaggggatatgttgaaaaggatactgttagtttcaacaagtgctcatgatatgaatggacacccgactggtttgtggctggaagagctcgcagctccttatcatgtatttaaaaaggctaagtttgatgttgatattgtgtcaataaaaggtgggagagtacctatagatagagtgtctattccgaatggtatacctcgcgaattcaagcatgtagcttctttattgcaaaatacgaggccgatttcaaatgttcatttttcggattatgatgcggttttatttggtggtgggcacggggcgattgtagattttccaggtaatccatatgtagcaaatttgattgagaatatgtataacaataaccggattgtagcggctgtttgtcacggagtaagctctttagtcggtgtgaaaaataaggatggctcgttttttgttgcgggtaagcgtataacaggttatacaaacgatgaagaaagagctgtacatttagaaaagcgcgttccgtttttgttagaaagtaagttgaaagaagaaggagctttgttttatgtagcccccaattttacgccgcatgtagtagtagatggtcatttaattacaggacaaaatccacagtctagcgtggaaataggtaaggctataaaaagggctgtaaataaattatcgtcattttaatttctgctcatttcttcttattaacgggaatgtcttcttttcaaaaaaagatggagcaatgaatatgcactttatatagaagaaaccgactttcttatagaaggtcggttatttttctatcttgcaaattacgaaaaaaaggagcaaaataaaaaaggtcctagtctatacatgggcaaatgaaaattttcatacagaagcatttgaagtgagtgaacttaaagtgtgtaaaatataatgataaacataaaagatgatgaatgagaaaacgggtgatgaagttgaatagagcaatcggtgttatcgattcaggagttggcggtttaacagtagcgaaggaattaattcgtcagttgccgaaagagcgtatcatatatttaggagatacagcacgttgtccttatggtccacgttctcgagaagaagtacgtcgatttacgtgggaaatgacggagcatttactaaatttaaatattaaaatgttagttattgcgtgtaatacagcaactgcagttgtattagaagagatgcaaaaacaattaccaattccagtagtaggagttattcacccaggatcacgtacagctttaaaagtgacaaacacgtatcacgttgggattattggaacgattggaacggtgaaaagtggtgcatacgaagaggcgttaaagtctattaataaccgtgttatggtagaaagtttagcttgtccacctttcgttgaacttgtagagagtgggaatttcgaaagtgaaatggcgtatgaagttgtaagagaaacgctgcaaccactgaaaagtaccgatattgatacacttatattagggtgtacacattatccgattttaggacctgttattaaaaaagtaatgggagataaagtgcaactaattagttctggtgatgaaacagcacgtgaagtaagtacaatcttatatcatagtaaaatgttgaatgaaggagaagaacaaagcgatcatctcttcttaacaacaggaaaaataggcttgtttaaagaaattgcatcaaaatggttcggtcaaccgattgaaaatgtgaagcatattcatttagaaaaagaataatagtagaatttatataagtgagctcctgagaaatcaggagcttttgttttatcttgctatttgctgggtagtaagacccctgctgattaaagtttcaatttataagaggcacagcttgttctaaaacgtgaaacagctcgtatacataatagtacaaacttagattttaggggggaatggcatgcctaaatccacttttaaatgggttgttggtgctactgtgagcgctgttttactaacagggtgtggctttataaatcaagagaaagcaactgaacaaattgatccaccaaaacaagttacgtatacagagggtgggaagaaagaagtagctaaaaaagataagcaagggcaaatggtaaatagagaactataccttgttgataaaaatggttatgttgtaccacaaacgttagctatacctactccgaaagcaaatgagactgtgaagcaaacgttagaataccttgtgaaagatggaccggtaacgaatttattaccaaatgggtttcgtgcagtcattccggcgaatacaacgatgaccttagatttgaaaaaggacggaacggcagttattgatttctctaaagaaatgaaaaactatgcgaaagaagaagagcgtcaaattgttgaatctatagcttggacgttgacgcaatttacagagataaaacaagtgcagttccaaataaatggtgagaaattggcaaaaatgccggttggtggtacaccgcttggtgaaggagtgagccgtgcaaatggtattaacttcgatgatgaacaagtaacagatgtaacaaatacaaaaccagtcacactgtattttatggcgcaaaataataataaacagcaatactacgtaccagtcacacgccgcgttgcggaaggtaaagaaaatgactatgcagcaattatagatgagcttgtaaaaggtccgatccatcaatcgctcctaaatgattttaatccaggcgttaagcttattacgaatccgaaattacaagacggaaaccttacattaaactttaatgaaaatatatttgtaaacccagataaaaatatgatttcaaattacgtattgaagtcgttagttttatctttaacagaaaagaaaggtgtgaaaaatatttctattgaagtaaatggaaaagcaaatcttatagatgaaaagggcggaaagttaataaaacctgtagatcgtccagaaaacgtgaatacaggtagtttttaatcttgaataatttgatatacttaagtaagaaaggagaattgctttttgggttctccttcttttattgtatacatatcatacatttaaatttggctatactaacgagtagtaattaagaggaggttatttttatgcgagtagatggtagagagaaaacagaattacgccatatacatattcatacgaattatttaaaacatccagagggatctgtattaattgaagttggggatacaaaggtgatttgctcagcaacaattgaagagcgtgtaccgccatttatgcgtggagaaggaaaaggatgggtaacagctgaatacgcgatgattccacgtgcgacagaacaacgtacaattagggagtcaagtaaagggaaagtaacaggacgtacaatggaaatccagcgcttaattggacgagcattacgtgcggtagttgacttagaagcgcttggtgagagaacggtttggattgattgtgatgttattcaagcggatggtggaacgagaacagcttctattacaggtgcatatgtagccatggtattagcgtttgagaagttattacaagtagaaaaagtatctaaaattccagtaaaagattatttagcagcaacgtcagtagggattgttgaagaacaaggtgttgttttagatttaaactatgcagaagattctaaagcagacgttgatatgaacgtgattatgactggaaaaggccagtttgttgaagtgcaaggaactggagaagaagcgacgtttagtagagcgcagttaaatgaactacttgatgcagcagaacaaggcattttccaactgattgatatgcaaaaagaagcgttaggtgacatcgtatctcatatagagtagaggtggaaaaaatgaaacaagttgttgtagcgacaaaaaatatggggaaagtacgtgaatttgctgagttatttgagcgatttgatttagaagtgaaatcattacacgattttcctcatattgaagaagtcgaagaaactggtgaaacatttgaagaaaatgcgatcttaaaagcggatagtttgagtagacagttgaatgcaattgtaattgcggatgattcaggtcttattgtagatgcgttaaacgggaaaccaggcgtgtattcagctcgttttgctggagagccgaaagatgatcaagcgaatattgataaagtgttacaagaattaaatgaagtagcgtttgaaaagcgtaaagctcgtttctattgtgcattagcagttgctttccctgaaggtgataaaaagcctgtcattgtaaacgggacatgtgaaggatttattttagaacaacgccgcggggaaaacggctttggatatgatccgattttttatgtggaagaatataaaaaagcgatggcggaactaagttcagatgagaaaaatgctattagccatcgtggccgtgctcttcgtaaattagaagaaaaaatcccggaatggtttttaggagaataagggagagagaatgatgaaagctttaatcgtaagtgatagtcatagctctgtgaaggaattacagcagttgaaagagaaatatgaagggaaagtagatatcatgattcattgcggtgattcagagctaacgcctgctcatgaagaactgcaaggtttccgtgttgtaaaaggaaactgtgattatgctaactttcaagatgaaattgtaactgatgtagatggaattcgcttcttagttgtgcatggacatcgccataatgtgaaaatgacattacaaacgctagcgtaccatgctgaagaagtgggagcgcaagttgcatgctttggacattctcacgtattaggtgctgaattaatcgagggcgttttatttattaatccaggcagtattttattaccacgtcagcgtgtagaaaagacatttgctttattagaaatggatggaaatcaaatggaagttcgttttgaaacgttagacggacaactagttgaacaagcagtttttaaaagaggataagaaaatttatcctcttttaaaaaaggtgttgactttatgtgtggttatacatataataaatattgtcgatagggaaacggcgctaacgaagaaaagaaaataacatatgcgggtgtagtttagtggtaaaacaagagccttccaagctctggtcgagagttcgattctcttcacccgctccatgtcccagtagctcagccggatagagcatacgccttctaagcgtacggtcgggagttcgaatctctcctgggacgctaaaaaaaccttgttatcttttgataacaaggttttttgtttgtctaaaatttgatgtttgggttataggtgtagttcattcttgatatttgcgacctttcctttgatattaagtagttgcatatgtacttctttttcttaaataaaaagagcgccatttatgcgccctattcctcttatttaatttaaagaatcaataggtttatgatggaactcaaatccatatccagattctcttaattgtttacttacaatattataaaactctttaccattctagtacaattcagcagcagttatcggaacttattcccggtagtgtgttacaattaatagaagcggaaaacgagaatctccaattgactggacctgtgattggttagatggtttaagaaggtcgtataaaaaagggagatggcgcaaagatggcgagatcaaatgagaatgatttaacggagaaattggcggaaggtcaccggaaatatggtgatggcaattttacagtacagaacatcggtgatgaaactaacccgaattggactgtcgtaaaaaatgtgaggaaaggatcggcaggcattcgcgaaggagaagatatattaagactgcgatcaaaatatataaaatagtacggaaatgggcggagcgggagttcgaatctctcctggggcgccaagaaaaccttgttatcttttgataacaaggttttttgtttgttttaaattagttgttaataaacttgtcaaagacaaaaccataatctttcacattatattgtttcttcgtatcaacgagccagttaaaggcaatctcgttcatctctttaaattgctctgctaagtttacttgtgcgtttgaaatacggctgaaagcgttagatgccatatctaaacttttgtgtgcatattgtaatgtaatatcgttgtcgtatgaaatttcttcaattttaagtaaagctttatataaatcttttaattcttcaatatgttttttatggacatcaattgaatagtgttcatcgcccatttggaacttaatttctacatctaaatcaatcgttcccgcagtttcaagcgctacgtttttaatttgatatttactatagctaaagcggcgtagtgtacgttttttacttgttgcgcttgtaccgtctaagtgaattaaccctttgtttgtgaagcaatattcatctgatttcgatttaattagaaagtaaattttctccccatcttcatgcattacataatcatcggcatcgaccttatcatagtctttaggtgtaataacagaacctacatcgcttagtcctaatacatctgcggccatttttttaaacatatataatcccccttgtaaattaaagtcttaattgtacaaaaatatattaacatgatcttcatcctttgttttcttgtaatacgaaaatatctgaaggtaagttaagaaaagtaatgaataattattttgatcctaaattatttagtaaatctattagtttaagagtggattctccgaaaaataaccaagagaaaaaagttaattttgcaagtgattataaataaattccgtgaaagcacctcaagcgatatgaggtgtttttcaatctctttttgaaatcttacaattctgtaaggtaactgtaaggtagttcgatggtaagaaattgctaatcttttataatgaagataacaacgataaaacgaggaggcagaaatgatgaaaggattagttgtaacgggcttgacggttgcttttggatttgtagcgtatgagaaattaacgtatgtagttgatgttgtgaaacatttgattgcttagagaaaacagccatgagagggaaagggaatgagtgaatgaatggaatggttatttggaattataggtacttgtagtgtagtgttattgttctttgtcccaagtggtatacttagttcgacaacaagtttgttcttcttaagtttgtttgcttgtacgatgcttattattatgtttttaatgaagcgaagtaaaccaatcttctattttagcatgattgttatggcaattattgttctccaaattattacccttgtaatataccccacaattataaaagctttccattaatgatgaatcctctgcgtttgttgctggggatttttacttgtacaattttaatttttagtagagatttatttgtattggaatgtaaaaattaaatatttttatatttcaaacaaataatttggggatgttgtgttctcattacgcatttgatatatttactttgaacataattaaaatcaagaaaaagaggcggacgtatggataaaaaagaaaatacggtcgtattgtttccgcagctatcagagcgctatattgatgaaggttttttagcgttgaaagagcggaagttcgaagatgcattgcgctgctttgaaatattacgtcagtataatgcggaaacggaacaaacggaattagcttcagttatttgtttactcgaattaaaacgtatggaagaagcgaaagacaaatgtgaacagttgcttaaaacaggagttgtcttatttggtgatattcttgaaacgtacgtgactattttagttcaaacaaatgattatgaaggtgttattgaaactgttgaaaaggttttacaaacgaaagatataatgcctgatcaaaaggaaaaattagcgcagcttgctttatttgcagaaggtatgctaaatgagggagacgcatcgctagtggattcaaattttgagttgaatgagtttactaatgaaatttttggagaaaactttggacagaagctaagagcgattcagcgactttcattaaaagacttagatcttgcattacctgttttaaagaaatttttaatagatgaagagcaacacccctatttgaaaacttctattttgtataaaatgatagaaagtcaggtagaagaggaaatagaggtggaaaagtttgggaatgcaattaaggtaattccggcatttacaggtcataatgaggagcaatccaataacattatacataaattatcaagtcgattagagcaaaaatatcccgatatatttgaagcgatggttacatattggaaagaattgcaaattagcattttcccattcgctctattaatggataaagaagagatttggtcagctgttttagagagaattggaagaaagcgtttcggattggctattgatgaagaagagcttatggcagcatacaatatcgaattggaagagtttcatattgcctatcaatggttattacgtgttgaaagagaaggatatttgcccgtataattatgaaaaagaatcgttcagttcttgaaacgagcatattctatgttataatgtaagggttgcaaaaggcagaaaactgcctgtttgtaagagaagagaagtgtaattctcttacttaatatgtttcatattattctcgaacaaaatataccgtagttgtcttctgggcaattagtagattggaacattatatctgaaagcttttgctagaggattatttgtgtatttgttatttcaaaaaagagataatgaagatcttaatctatagaggtatgtgcatacattattatagttggagggaaagaataaatgtctacaaaatgggaaaaattagaaggtaacgttggcgttttaacaatcgaagttgatgctaaagaagtaaacaactctatcgacgctgcgttcaaaaaagtagtaaaaacaattaacgtaccaggtttccgtaaaggaaaaatgcctcgtccattattcgaacaacgctttggtattgaatctttataccaagatgctttagatatcattttaccaaaagcatacggtgaagcgattgaagaagctggtatcttcccagttgatcatcctgaaatcgacatcgagaagttcgaaaaaaatgctaaccttatcttcactgcaaaagttacagtgaaacctgaagttaaattaggtgagtacaaaggtttggcagtagaaaaagttgaaacaactgtaactgacgaagatgtagagaacgaattaaaatctttacaagagcgtcaagctgaactagttgttaaagaagaaggaactgttgaaaacggtgatacagctgtaatcgacttcgaaggtttcgttgatggcgaagcatttgaaggcggaaaaggcgaaaactactctctagcaatcggttctggtacattcatcccaggtttcgaagagcaagtaatcggtcttaaatctggtgagtctaaagacgttgaagtatcattcccagaagagtaccatgctgctgaattagctggcaaaccagcaacattcaaagtaacaattcacgaaatcaaaacaaaagaacttcctgagttaaacgacgagttcgctaaagaagcagacgaagcggttgcaactcttgatgaattaaaagcaaaacttcgcacaaacttagaagaaggcaaaaagcacgaagctgagcacaaagtacgtgacgaagtagtagaattagctgctgctaacgctgaaatcgaaattccagaagctatgatcaacactgagttagatcgtatggttcgtgaattcgagcaacgtttaagccaacaaggtatgaaccttgagctttactaccaattcacaggtactgatgctgacaaattaaaagagcaaatgaaagaagatgcacaaaaacgtgtaagaatcaatcttgttcttgaagctatcattgaagctgaaaacatcgaagttactgaagaagaagtaactgcagaagttgaaaaaatggctgaaatgtacggtatgccagtagacgctatcaagcaagctcttggaagcgtagacgctttagctgaagatcttaaagtgcgtaaagctgtagacttcttagtagaaaacgctgcataataaaataacaaggcacgattaaaatcgtgccttgttttataaatatagaaatatatttataaaacttttcgatggagaaggaaaagttcctttacaagtcgaatatacatatttcaaaagttttaaaaattttttatttgtacataactagtcatattatttgtatttctcgccacgtagtgacataatatgtatttacatacgatacatttatcgtgtacatacgaaggcaagaggttagcactttgtaaggggtgtgaaaatatgtttaaatttaatgatgaaaaagggcaattaaaatgttctttctgtggtaaaacacaaacgcaagttcgaaagttagtggcaggtccaggtgtttacatttgtgacgagtgtatcgaactttgtactgaaattgtacaagaggagcttgcgaaggacgaagaagtagaattcaaagatgtaccgaaaccggtagaaattcgtgaaatcttagatgagtatgtcatcgggcaagatagcgcgaaaaaagcactagcggtagcggtatataaccattacaaacgcattaattctaacagcaaaattgatgatgtagaattagcgaagagtaatatcgcacttatcgggccaacaggtagtggtaaaacattacttgcacaaacgttagcgcgtattctaaatgttccatttgcaatcgcggacgcaacatctttaacagaagctggatatgttggagaagatgtagaaaatatcttactaaaattaattcaagcagctgattatgatgtagagaaagcggaaaaaggaatcatttatattgatgagattgataaagtggcacgtaagtccgaaaatccatcaattacacgtgatgtatctggtgaaggtgtgcagcaagcacttctgaaaattttagaaggtactgtagcaagcgttccacctcaaggtggtcgtaagcatccgcaccaagagtttattcaaattgatacaacgaacatcttattcatttgtggtggagcgtttgatggcattgagccgattattaaacgtcgccttggtgaaaaagtaattggatttggttctgagaagaaaaatgctgatgtaaatgagaagcatgttttatctcacgtattaccagaggatcttttaagatttggtttaattccagagtttatcggtcgtcttccagttattgcgaacctagagccacttgatgaagatgctcttgttgatattttaacgaaaccgaaaaatgcacttgttaagcaattccaaaaactattggagcttgacgatgttgagttagagtttgaagaaggtgcactaatcgaaattgcgaaaaaagcaattgaacgtaaaacgggtgctcgtggacttcgttctattattgaaggcttaatgcttgatgtaatgttcgaacttccatctcgtaaagatatcgagaagtgtattcttacaaaagaaacagtagctgataatgagccgccaaaattggtgttacaagacggtactgtacttgatacaaaaacatctgcataatgcgaaagggaaacagcaatttttataattgctgtttttctttatgtttagctacgttcctccgcggaaatactaagagataaaatattgcgggaggaaataaataatgagctggacaaatatatttttagttgttcaacttgtttttggtgtaattgtcggattgtatttctggcatttacttcgaaatcaacgaacacaaaaagtttcaattgatcgagaatcgaaaaaagaattagaacagcttcgtaaaatgcgtgagatttctttaacagagccgctagcagaaaaggtgcgtcctacaacctttttagatattgtagggcaagaggacgggattaagtcgttaaaagcggctctttgtggtccgaatccgcaacatgtaatcatatatggcccacccggtgttgggaaaacagcggcagcacgtcttgtattagaagaagcgaaacgaaatcctaaatctccatttcgtacgaatgcaacatttattgaacttgatgcgacaacagctcggtttgatgaacgtggtatcgcagaccctttaattggttcggtgcatgatccgatttatcaaggtgctggggcgatggggcaagcaggtattccacaaccgaaaaaaggtgctgtaacagatgcacatggtggtattttgtttattgatgagattggcgagctccatccgattcaaatgaacaaaatgttaaaggtgttagaagatcgaaaagtatttttagaaagtgcgtactatagtgaagaaaatacaatgatcccaacatatatacatgatattttccaaaaaggcttaccggcagattttcgcttagttggagcaacgacacgttcgccagaggaaattcctcctgctattcggtcacgttgcttagaagtatttttccgtgaattagatacggaagaaattcaaaaagtagcgaaaaatgccgcggaaaaagtagaaatgcaaataggtgaaaatggtattgagatgattgggatgtatgcaaggaatggacgagaagcgattaatctcgtgcaaatctctgcgggtatggcgataaatgaagaacgttctttcattaaggatgaagatatagagtgggttgttcactcaagtcagcttacaccgaaatatgaaaagcgcatttatccgattccaaggattggtcttgtaaatggtcttgctgtatacggaccaaatacaggtgcgttattagaaattgaagtaacagcaattccggcgaaagataaaggatcggtaaatgttaccggaattgtggaagaagaaagtattggtagtcaaacgaaatctattcgtcgtaaaagtatggcgaaaggctctgttgataatgtattaacagtacttcgttctttagatgtgttgccagaaggatacgatatacatattaattttccagggggtatcccaattgatggcccttctgcaggaatcgctatggcaacaggtgtatattctgcggtgcatcgcacgtatgtaaataatgaagtagcgatgacaggtgaaataagtatacacggagaagtaaagcctattggtggtgtatacgcaaaaataaaagctgcgaaaaaagcgggagctaagaaagtcattattcctgctgaaaatatgcaaccatttttgtatacgatcaagggaattgaaattattcctgtccgtaagttaaaagaagtatttgagttaacgtttatgcaaggaaatatgcatagagagctagatgtacatactaacgtagacgaaacagatgcacaatctatgtaaaaataaacaataataaaatttgccagacttcgtttaagtttgtatgcttaatcggagtctttttcttttcgtgaggtagaaaaacaagctatttacaattgcgcggaatctcagcaattgcatctaggtgtattgtaatataaaatagttgaacaggagtttaatttattatggaggtgctatgtctagtatgaatacgaacgaaagaatcgtgcccctcctaccattaagaggcgttctcgtatatccaacgatggttttgcatcttgatgtaggacgtgataaatcgatacaagcactagagcaggcggcaatggatgaaaatatcatctttttagcaatgcaaaaagaaatgaatatcgatgatccgaaagaagatgacatatatagtgtaggtacagtggcgaaagtgaagcaaatgttaaaattgccgaacggtacgcttcgtgtccttgtggaaggtttacatagagcagaagtaatagagtttatcgaagaagaaaatgtagtacaagtgtctattaaaacggtaactgaagaagtagaagatgatttagaagagaaagcttttatgcgtacgttactggagcatttcgaacaatatattaaagtttcgaaaaaagtttcaaatgaaacttttgcaacggtagctgatgtggaagaaccagggagattagctgatttaattgcttctcacttgccgattaaaacgaagcagaaacaagagattttagagattgtatctgtaaaagaacgattacaaacacttatttcaattattcaagatgaacaagagttacttagcctagaaaagaaaattgggcaaaaagtgaaacgttccatggagcgcacgcaaaaagaatatttcttacgtgagcaaatgaaggcgattcaaactgaacttggcgacaaagaaggcaagggcggagaagtagaagaacttcgtgagaaaattgaacagtcgggaatgccggaagaaacaatgaaggctgccctgaaagaattagatcgttatgaaaagttaccagcaagttctgcggagagtggtgttattcgcaattatattgattggttattagcgcttccgtggacagaggcaacagaagatataattgatcttgctcattcggaagagattttaaataatgatcattacggtcttgaaaaagtgaaagagcgtgtacttgaatatttagctgtacagaagttaacgaattcattaaaaggacctatcctttgtttagtaggccctcctggggtcggcaaaacttcgttagcgcgttcaattgcaacatcattgaatcgtaacttcgtccgtgtatctcttggtggtgtgcgtgatgaatctgaaattcgtggtcaccgtcgtacatatgttggagcaatgccaggacgcattattcaaggtatgaaaaaggcgaaaacagttaatccagtcttcttattagatgagattgataaaatgtctaacgatttccgtggagatccatcagcggcattacttgaagtattagatccagaacaaaaccataacttcagtgatcattacattgaagaaccatatgatctatcaaaagttatgtttgtagcaactgctaatacactttcaagtattccaggtccattacttgaccgtatggaaatcatttcgattgctggctatacagaacttgaaaaagtacacattgctcgtgagcatttattgccgaaacaattaaaagaacatggcttacgaaaaggtaatttacaagtgcgtgatgaagcgctgcttgagattattcgttattatacacgtgaggctggtgttcgtacgctagagcgccaaattgcaaaagtttgccgtaaagtagcgaagattatcgttacagcagaacgtaaacgtatcgttgtgacagagaaaaagattgttgatttacttggtaaacacatattccgttatgggcaagctgaaaaaacagaccaagttggtatggcaacaggtctagcttacacagcagcaggcggcgatacacttgccattgaagtttctgtagcgccaggaaaagggaaactaattttaacagggaaacttggggatgttatgaaagaatcagcacaagctgcgtttagttatatacgttctcgtgcagaagagcttcagatcgatccgaatttccatgagaaaaatgatattcatattcacgttccagaaggagcagttccaaaagacggaccgtcagcaggtattacgatggcaacggcacttatttctgcgctaacaggtattcctgtaagtaaagaagtgggtatgacaggtgaaattacacttcgtggtcgtgtattaccaattggtggtttaaaagaaaaaacattaagtgctcaccgcgcaggcttaacaaaaattattttgccagcagaaaacgagaaagatttagatgatattccagagagcgtaaaagaaaaccttacgtttgtgcttgcatctcatttagatgaagtattggagcacgcattagtaggagtgaaacaatgaaagtaacaaaagcagatattgtaattagtgctgttaaaccagaacaatatccagacagtgatttaccagaaattgcattagcaggtcgttcaaatgtggggaagtcttcctttattaataaaattttaaatcgtaaaaagttagtgcgtatttcttctaaaccaggaaaaacgcaaacgctgaactttttcttaatcaatgagatgatgcactttgttgacgttccaggttatggatatgcaaaagtatctaaatcagagcgcgctgcatgggggaaaatgattgaaacgtactttacaactcgtgagcaattagacgcagctgtattagtagttgatttacgtcaccaaccaacaagtgatgacgtgatgatgtatgatttcttaaagcattatgaaatcccaacaattattattgcgacgaaagccgataaaattccgaaagggaaatggcaaaagcatttaaaagttgtaaaagaaacgcttgctgttgaaattggcgatgaaattgttctattctcttctgaaacaggacttggaaaagaagaagcgtggaaagcaattcataaatttacaaaaacaaaaaacgcgtgacgaatgtcgcgcgtttttgttttgctaaattttttagcgtacgtttaatgtaacttcaatatttcctcgtgttgctttcgagtaaggacatacaccgtgagccgcttctacaagttcttgtgcttcgctatgtgaaacgccagccacatgtacatcaagtacagcagatagaccgaaaccaccatctgtatcttttccgatagaaacgtgagcagttacttctgtactttctactttcacacgttttgtacgaatgacaagttgtaatgcactatcgaaacaagctgcataaccagctgcaaatagttgttctggatttgttgcttctccgcctgcaccacctagtgctttcggcatttttacatcaagatttaatatgccatcatctgaaactactttcccatttcttccacctgttgctgttactgaagcagtatataatttatccatatttattccccttttccatcattaattgttttcattgtgtcaattagtttatttagttgaattaataaagagcgatattcttgctctgtaattcctaagtttgtagccatcgttgtcggtaatgaacaagccttttcctttaaatcgttgccttgttctgttaattcaatacaaacttttcgctcgtcttctttggaacgaacacgttttacaagttttaatgattccatgcgttttaacataggtgttaacgtaccagaatctaaaaatagacgttctccaatttcttttactgttagtccatcttgctcccatagtacgagtaaagtaatgtactggggatacgtaatacccatttcttctaaataaggtcgataaaaacgagtaacctctctagagcaggtgtaaatagaaaaacaaagttggttatctagatgcaaagagtcctctgtcataaataactcccttccaattaagttgtgcacaatttaattttgtaaaaccaatataacgaaaaagaaatacaatgtcaaatacattgtattgagaaagtctttgttgcattttggaacaatcatacatattttccttcatgatgaaagaagatagggaagatgatgttataatttatatggaatagtttccatcacttgattatgagggctttttttggtaacgtacaaatagagttattaatttataatcattataaagtagaagtttttttattagtgttactgaatctcctttattacatacggagaataattaaaaaataatcggttgttcacacgattgtcagattcataagaggaaagttgtattatgatagtagataaagtgataaaacgggtgaagggggacatgctgcgtgcatattcttgttgttagtgtaaattatcgaacagcccctgtagaatttcgtgagaaactcacatttcaggcagcagaactagagcgagcgatgactacattacaaaatcaaaagagcgtgttagagaatgtcattgtatcaacttgtaatcgcactgagatttatgctgttgtcgatcaattacacacgggacggtattatattaagaagtttttagctgattggtttcagcttgaaatagaagaagtcgcgccatatttaactatttttgaacaagatggtgcaatagatcatttattccgcgtaacgtgcggtttagattctatggtagtcggagaaacgcagattttaggtcaaataaaagatagctttttagaagcgcaacaagttaaagcaacaggcacaatttttaatgaattgtttaagcaagtcattacattagcaaaacgtgcccactcagaaacaacaatcggggaaagtgcgatgtctgttagttatgctgctgttgagcttggaaagaaaatatttggcgagttaacagattgtcatgtgcttattcttggtgctggtaaaatgggcgaacttgcactgcaaaacttatatggaagtggtgctcgtaaagtaacagttatgaataggacgctttcgaaagcagaagtaatggctgagaaatatatgggacatgcaaaatcgttaagcgaattacaatgtgcattattagaagcagatattttaattagttcaactggtgcatcggagtatgtcattacgaaagagatgatgacgaaggtagagaaaatgcgctctggtcgccctttgtttatggttgacattgcagtgccacgtgatattgatccagcgattgatgagctagaaggttctttcttgtatgatattgatgatttacaaggagtagtggaggcaaaccgtgctgagcgtttgaaagaagcagagaaaattcaatttatgattgaagaggaaattgttctatttaaaacgtggttaagtacacttggtgttgttccattaatatcagctcttcgtgataaggcacttgcaatccaaagtgaaacgatggtaagcctagagcgaaaaataccaaaccttagtgatcgtgagaaaaaagtcattagtaagcatacgaaaagtattattaatcaattattaaaagacccaattttagtagcgaaagaaatagctgctgaagagggagcgagcgaaaaattagcgttatttgcgaagattttcgatttagaaacggaagacgtagagagttgtgcggaagaagtagaacataaaaaagtgtggacaccatccgttccatctttataatttggaaggatgatcggatgagttttttaaataacagtattatttatcatattgcaattattttatatgcttgtagcattagtttatattttatagattatttccaaagtaaccgaaaggcgaaccgatttgctttttggttacttgcgattgtatgggtcctgcagtctatttttatgttgcttagggctacagattcagaaacgaatcctattttaactttattatcagggatttatttttatgtttggttattgattacgatgtcgttagtcattaatcgatttatgagaatcgactttttagtcttttttacaaatgttgttgcatttggcgtaagcgctttttctatttttacaccgctcggaaagatgtcgccagtacttgcggaacaattagtttcagaacttgtatacgtgcatgtcggtatggcaattatttcttacgcaacgtttactgtatcgttcattttttctattatgtacttattacaatatcgcctattaaaaaagaaaaaatggaatgcgagattaagaaggttagggaatttaccgaagctagaatctatgtcttacggattaaatttattttctgttccatttttcttactagcaattttattaggatgtatatggggatatacaaaattggataatttccattggtatgatacgaaagtaatcggatcttttgtcgttctatttgtgtattgcacaggtttatatttacgagcggcagatgtgttgcaaggtaagaaaattgtacagtggaatatcggatcgtttctcgtaatgctagtaaacatttttctattaagcagtttatccaatttccacttttggtatttataatgaggagagagaattatgcgcaaaattattgtaggatcacgaaagagtaaactagcattaacgcaaacaaactggtttattgatcagttaaaagccctaggtctaccatatgaatttgaagtgaaagaaattgtcacaaaaggtgatgttattttagatgttactctttcaaaagtaggcggcaaaggcttgtttgtaaaagagattgaacatgcgctacttacgaaagaaatcgatatggctgtacatagtatgaaagatatgccagccgtacttccagaaggtttaatgattggctgtacaccaaagcgtgttgaccctcgtgatgcttttatctcaaaaaatggagcatcgtttaaagagttagcggaaggtgctattttaggtacgagtagtttaagacgtagtgcacagctactcgctgcgagaccagatttacaagttaagtggattcgcgggaatatcgatacacgtttacgtaaattaaaagaagaagattacgatgcgattattttagcgacagctggattacaaagaatgggctgggatgatgaagttattacagaacatttagatgaagcgttatgtgtacctgctgtaggacaaggtgcattagcgattgagtgtcgtgaggatgataaggatttattacaattgttagcgcatattaatgatacgataacagaaagaacagtggcagcggagcgagtatttcttcataaacttgaaggtggatgccaagttccaattgctggatatgcaacccttacagaaaacgatgcaatcgaattaacagctcttgtcggctctatggatggctctgttttattaaaagagacagtagtgggtactaatcctgaggaagtaggattagaggccgcggaccgtttaattaagcaaggcgccaaagaactcattcttgctgcaaataaggagcaacaataaatatgaacgctctcgctggaaaaacggtattgattacacgtgcccagcatcaagcgaaacaaatgagtgtagcagtgaaagaaaagagcggaattccattggaaattccgcttttgcgtatggaaggtatgtctcataggcaaattcaacatattgaagagcagctacattcatacgactgggttatttttacgagcagaaatggtgtagctttttttatagatagtttaaaaaagaaactaccactaaccattaaaatcgctgcggtaggtgtgaaaacaaaattagagttagaaaaaaggggctatcaagttcattttgttcccacttcatttgttgcagaagcatttgcagaagagtttctaaaagaattaagtggaaatgaacgtattttatttccgaaagggaatttagcaagagaggtaattccggttgccctacgggaaattggtatttctctagatgagctaaccgtatacggtacgaaagtgaatatagaaaaaaagcaagagcttatagcggcattgaagttagggaaagtagacattattacatttacgagcccttcaactgttactagttttgttcgtttacttaagggtacaaactggagagaatggacaaaaaaatgtacaattgcttgtataggacctattacggaaaaagaggcaagtctttattttccgtctgttattgtgccgaaagagtacactgtagaagcattactacaatgtgtttgtgaatctataaaatgaaagaatggggatagaaatctatgaactctttacaatttaatcgtcatcgtcgtttaagacaaagcgggggcatgcgtgcgcttgtgcgtgaaacgtttttacatacggaagattttatttaccctatttttgtattagaaggtgaaaatgttcgtaatgaagttccttctatgccaggcgtatatcaaatgtctttagatttattgcaagctgaaatgcaagaagttgttgatttaggtattcgttctgttattgtatttggtttacctgctgaaaaagatgaagttggatcatcagcatattgtgatcatggaattgtacaacgtgctattcagcaaattaaaggtgatttccctgagctagtagtagttgcagacacatgtttatgtcaatttacaagccatggtcattgcggtgtaattgaagatggtattattttaaatgacgagtctcttgcagttcttgcgaaaacagctgtaagtcaagcgaaagcaggagcggacattattgcgccatcaaacatgatggacggcttcgtaacagcaattcgccatgcattagacgaaaatggttttggacacgtgccagttatgtcgtacgctgtgaaatattcatcagcattttatggaccattccgcgatgctgcgcacggtgcaccgcaatttggtgaccgtaaaacatatcaaatggatccggcaaaccgtatggaagcattccgtgaagcagaatcagatgtaatggaaggtgcagacttcttaatcgtaaaaccagcgctttcttacttagatatcgttcgtgatgtgaaaaataactttaatttaccagttgtcgcttataatgtaagtggtgaatattcgatgattaaagcggcagcgcaaaatggttggattaatgaaaaagaagttgttcttgaaaaattaattagtatgaaacgtgcaggagcagatttaattattacgtatcatgcaaaagatgcagcaagatggttacaagaaggaggcgctaaataatgaaaaagtttgataagtcaattgcagcgtttgaagaggcgcaagacttaatgcctggtggcgtaaatagcccggttcgtgcctttaagtctgttgggatgaatccgttgtttatggagcgtggaaaaggctctaaagtatatgatatcgatgggaatgaatacatcgactacgtattatcatggggtcctttaattcatggtcatgcaaatgatcgtgttgtagaagcgttaaaatctgttgctgaaagaggtacaagcttcggtgcaccaacagaaattgaaaataaattagcaaaacttgttattgagcgcgtgccatcaattgagattgtgcgtatggttaactctggaacggaagcaacaatgagtgcactacgtttagctcgtggttatacaggtcgtaataaaatcttgaaatttatcggttgttaccacggtcatggtgattcgttattaattaaagctggttctggtgtggcgactttaggtttaccagatagtcctggtgtaccagaaggtgtagcgaaaaatacgattacagtagcttataacgatttagaaagtgtaaaatacgcgtttgaacaattcggtgatgatattgcttgtgtaattgtagaaccagtagcaggaaatatgggggttgttcctccgcagcctggatttttagaaggtcttcgtgaagtaacagaacaaaacggtgcattgcttatttttgatgaagtaatgacagggttccgagtagcttataattgtggccaaggttattatggcgtaacgcctgatttaacatgcttaggtaaagtaatcggtggtggtttaccagtaggagcatacggtggtaaagcggaaattatgcgccaagttgcgccaagcggaccgatttaccaagctggtactttatcaggtaacccacttgcaatggcggcaggttatgaaacgttagtacagttaacgccagaatcatatgtagaatttgagcgtaaagctgaaatgttagaagctggattacgtaaagcagctgaaaaacatggcattcctcaccatattaaccgtgcaggctctatgattggtattttctttacagatgaacccgttattaattacgatgcagcaaaatcttcaaacttagaattctttgcggcttactatcgtgaaatggtagaacaaggtgtattcttaccgccatctcaattcgaaggtttattcttatcgacagcacatagtgatgcagatattgaagcgacgattgcagcagctgaaattgcaatgtcaaaattaaaagcgtaatgtattagagaaaatcgctctccataaggggagcgatttttttattcataaagtaagctttccgcacataaatctgtaatgacatatagtttgggagggggaaaagaagtggctgcagatcattcattacgattttcattaaaagaatctgtgtggttccaaaaaggacaggaagtcgaagaacttttgtcaatttcgttagatccagacgttgagatagaagagcttgatcatgaagtaatcgtgagaggacaattagatttaacgggagagtatgttgcacgaaaagatgattcagcgtattcattaagagaactatcgccagcaaagtcaattgattatgtagaaacaagagaagatggggttaatgaacttgttcattcctttccacttgaaatatcaattccgagaaatcgagtgaaagtaattgaagagctatatgtatcaatcgaggaatttgattatgaattaaaggaaaatggttgcttacaattattagcggatatatctattaccggtttgtgtgatgaagagagaagcgaggatgaagttgaagaggaagaaacggtgtatgctgagttagaagaagattcagcgcaagaggatgaaaatagaccggcgccgcatgtagaagaaccagcatataaggaatcagatgagtgggaagattacgcatttgaaccgttccaattagaggaaagaaaagagcaggaattagaagaagagaaaatagaagaacatgaatttgtggaacgtgaagaggagcaagaaacaacgccgcaatttgaactgttcggacgaaaagatttcaagaaagaaaaagcaaaaaagcaggaagaacaagaagaagagtactcacagcgagatgaaaatgcgctttatttaacaaaactatttacgaaagaaccggaagaagaatttacaaagttaagaatgtatttcgtgcaagaaggggatacaattgaatctattgcagaccgttatgaaacgtctgtacaaaatttacaccgtgtcaatcaaacagaagatatatttttaaatacggggcaaattatttatattcccgtttcaagggtaaagacgaaataaggaagtgagtgttttcactcacttcctttcttagaggctatgttttgaatagaaagggttattcgtatggatattgagttgcgaaatcactatgaacctatcgtgaggcaatatagattggatacgcagcatatggaagagcacggaaatgtaatgaaaatttatacgaatcaaggtccatatgcactcaagaaaatagaaggcagaaagttagagcggaataactttctgcatcatattcaatatttgaaggagaaaggtttttcaaattatgtacctatatatcatgcgacggatggaagttatattttaagtgacgggacgtataattattatttaatgccttggttagaacgtgcagaaggaaacggtgatgacaatgatcaataccataaaatgtttcagacacttggaacgttgcatcaaaaaactgtgaaggaagaaacgtatacggaagaagatttagaaaaacattatacaagtatatccgatcgttgggaaaatgatggtgagatgttagaagagtttctcgtagaatctgaatcaaaatggtatatgtccccgtttgaattgcaatattgtacgtactatcatcatgtaatgagagcgcgtgaatttgcaacgaagcaattaaatgagtggaacgatgcgatgaaagaaaaagagaaaacgcgtattacttttgtgcatggtaatgtgtcacttaatcattttttatttgactatgagcggaatggctattttattagtttagaaaaatcgaagtttgcaacgcctgtgcaagatatagtaggtttttattcacggtctttaaacacatatccaatcgcaagaagtgatcggtttgaatggtttcaaatgtatcaaaaaaatttcccttttacgaaagaagagcaactacttatgtttgcgtatatgacgtatccatcgcaatttattcggcaaatccagtcttataagaaaagaagagataatcgcaacgaggaaaatgaactgcgcggagtaaagagtttgcaacaatcgcattggctcgttagcaatatagaatatttcctgtcgcaattacaagctgcccagcaagggaacggataaagtaaaggcattctccgctgatgattagccttcaccaattgggcgtttacgggcagcagggctcccatctaacttctttgcttcagctgagttttgaggtggaggtcttactgcccgcaaatagcgggggaaagaagataagtagaggattctacttatcttcttttttttgcacgaaaagctgtagttttaaatttatcttgacgaataaggtttcgttttttacactattgtatataataattaacaatcatataaatgccttgaaggggaagagtataacatgaaacgtcttcagagaggagaatcattagctgagagattctctagatagttatgttagaaggtagccctggagcatcttttctgaacggaatagttcttattaggaaaagacggatttgtccgttatcaaattaagagtataagcaaattatgaatttgtttgtaaataaaggtggtaccgcgatgtccctcgtcctttttggatgagggacattttttattttaaggagggaaaataatgtcaaacacggaaaagaatttaccaactaaatatgatcatatgtccgttgaagaaggcctttatcaatggtggcttgaaggcaaatattttgaagcaacaggagacgagaagaaacaaccgtatacaattgtaattccacctccgaacgtaactggtaagttacacctaggtcatgcttgggatacaactcttcaagatattttaactcgtacgaagcgtatgcaaggatacgatgtactatggcttccaggaatggaccatgctggtatcgcaacacaagcgaaagtagaaggaaaacttcgtgaagaaggtatttcacgttacgatcttggccgtgaaaaattccttgaaaaagcttgggagtggaaagaagagtacgcttctcacattcgtcaacaatgggggaaagttggtttaggactagactattctcgtgaacgattcacattagacaaaggtttatcagatgcggttaataaagtattcgttcaattatacgaaaaaggcttaatttaccgtggtgaatatatcatcaactgggatccagcaacacgtacagctctttctgatattgaagtaattcataaagaagttcaaggtgcattctaccatatgaactatccgttaacagatggttctggtcacattcgtcttgcgacaactcgtccagaaacgatgcttggtgatacagcagtagcagttcatccagaagacgatcgttacaaacatttaatcggaaaaacagttacacttccaatcgtaggccgtgagattccgattattgctgatgagtacgtagaaaaagatttcggaacgggcgttgtaaaaattacaccagctcatgacccgaatgactttgaagtaggtaaccgtcatgacttaccacgcatattagtaatgaacgaagatggaacaatgaacgaaaaagctggtaagtataacggtatggatcgtttcgaatgccgtaaagaattagtaaaagacttacaagaagctggcgtattagtagaaatcgagccacatatgcattcagtaggtcatagtgagcgtagcggtgcagttgttgagccttatttatcaacacagtggttcgtaaaaatggctccacttgctgaaaaagcagtagcgcttcaacaaaaagaagaagaaaaagtaacgttcgtaccagagcgttttgaaaacacatatttacgttggatggaaaatattcatgactggtgtatttctcgtcaattatggtggggacaccgtattccagcttggtaccataaagaaactggtgaagtatacgtaggtacagaagcaccagcagatattgaaaactggaatcaagataacgacgtacttgatacatggttcagttcagcgttatggccattctcaacacttggttggccaaatgaagattcagcagatttcaaacgttactattcaacagatgcactagtaacgggttatgatatcatcttcttctgggtatctcgtatgattttccaaggtttagagtttacaggagagcgtccatttaaagatgtattaattcacggtttagttcgtgacgagcaaggtcgtaagatgagtaaatctcttggtaacggtattgacccaatggatgttatcgagaagtacggtgcagatgcaatgcgtttcttcttatcaacaggaagtgcaccaggtcaagatttacgtttcagcatggaaaaagtagaatctacttggaacttcattaataaaatttggaacgcatcacgtttcgtattaatgaacatggatgatatgaagtatgaagaaatcgatttaactggtgaaaaatcagtagcagataagtggatcttaacgcgcttaaacgaaacaatcgaaagcgtaacacgtaacatggataaatatgagttcggtgaagctggtcgttcattatacaacttcatttgggacgatttctgtgattggtatattgaaatggcgaaacttccactatacggtgaagatgaagcagctaagaaaacaactcgttctattttagcttacgtattagatcaaacaatgcgtctattacacccattcatgccattcgtaacagagaaaatttggcaacatttaccgcatgaaggcgagtctattacagtagctgcgtggccaacagttcgcgaagatttacaagatacggaagctgcggcagaaatgcaccttctagttgatatcattcgctctgttcgtaacatccgtgcagaagtaaatacgccaatgagcaaaaaagttcaaatgcaaattaaagcaaaagatgaggctgtacttgctcaacttacgaaaaacagctcttacattgagcgtttctgtaacccaagcgaattaacaattcaaacagacttacaagcgccagaaaaggcaatgactgcaatcgtatcaggtgcagagttattcttaccgttagctgatcttatcaatcttgatgaagagagagctcgtcttgagaaagaacttgagaagttcgataaagaagtagaacgtgtacagaagaaactttctaaccaaggtttcgtagcgaaagctcctgcagcggttattgaaggagagcgtgcgaaagagcaagattacctagaaaaacgcgaagcagttcgtcaacgtctagcagatcttgaaaagtaaaaatgtttttagagactcactatattggtgagtctcttttctttgcgtataatagaactatgaaagttgtctattgaaaggggaaaaacatacgtgatacatacatacgaagaagcgatagggtggatccatagccgattgaaatttggaattaaaccaggattagaaagaatgagatggatgttagaagaacttggaaatccagagcgtcatataaaatgtgttcatcttgctggtacaaatggaaaaggttcaacgttaacatatatgcgttacatgttagaaggcgcgaaatataaggtaggaacgtttacctctccttacatcgaatcatttaatgaacgcattagtgtgaatggaacaccaattgcagacgaagagattactgaacttgtaaagatggtaaaaccagtcgttgaaaaactagatgaaacggatttaggggaagcgacagagtttgaaattattactgttatggcgatttgctatttcggtaaagtcaatttctgtgatgttgttttatttgaaacagggcttggtggacgttttgactctaccaatgttatacaccctgtcctcacgattattacgaatatcggtcacgatcatatgcatattttaggaaatacactaggggaaattgcatatgaaaaggcggggattattaagtctggcgtgccggtaattactggtgtacaagatgaagaagctttgcaagtcattcaaaatgttgcaaaggaaaaccatgcaaacttatacgaacttagcaagcattttacagcgttacataaacagtctaatgaagatggggaacagtttgattttacttgtcctttttccgcatttgaagatttgcaaatctcaatgaaaggcattcatcaagtaggaaatgcagcgttagcacttatggcagtaatgtatgtaaaaacatatttatcatttttaattgaagaagaggaaataagaacgggattactggaagcatattggattgggcgctttgaaaagttgcaaagtaacccggatattattatagatggtgctcataatccagaaggtatcgaaagccttgtgaaaacagtagaagcgcattacaaagataaaaatgtaatagtgttatttactgctcttggtgataaacaattacataacatggtaggccaattagaaaccattgcagatgaaattatttttacaacattcgcctttgatcgtgctatttctgctgataagcttgcatcatattcacagaaagaatcaaaattagtttttgaaaattggaaagaggcaattgatacaaaagttgaaatgatagcagaaaatgatgtttttatcataacgggttctctttatttcatttctgaagtacgaaaatatattcgcgagaaaaactagatagtctttgctatctagtttttttgttctacaaatgaagtcaaatgcatacatataagataaatatatagggttatttggcgaattcctctgacaaatatctcgtttttttatgaaatgaatatgatatgatgcggacaacgataagaggtgaggtgtgagtgtatggacaagcaatcacgaacgatctcagtgaaagtgaatggaacagaagcgaagtatgaggaaaaaaagaaagatgaatttgaatggatggtagtagaaagtgaacgaccgaaaaatgttgttccgtttcaaaaagcgaaatcaatgtctgtggaaaaataccgaaagaagtggagtaatacattaattgtaatcgttgcaactgcaatcattatcggtacggcgtttggaatggggatgcttcatttacttactggacaaggaacgacaggaggaagtgaagtgacagcttcaaggccgactggaaatggagaatcaagggtgggtggaacggcagaacaaacaccagcaccgaaagaagaaaaacaaaaagcacaggcaggaacgtcattggatccgatgaaattattttttgttcaaggggggctttattcttctgaagaaaagggacaggcagctcttgaagaatggaaaggcaatgggggcattggtgctttgagaccgagcggtgataagtatgcaatagttgttggtattgctagcgatgaacagtctataaatcaattaatgactaagtataaaaatgatggtgtctccgttttaaaaaagagctgggatataacagataaagcattgctgaaagatgataaagaagtagggacatttttaacaaaagtgcagccattatacactcatttagcaaaatatgcttctagcgtacaagttggtggaaaaagcagcccaaaagatatagaagcaattgaaaaagaatggaaaaaggttgaaaaagaaggggaaagtatgaaacgagaagaagcaaagaaactgtatatgtatacgtcggtagctgtacaaacagtaaaagatgggaagatggataaggaatctttggcgaaattaaatcaagttattattgatggtttactctcgtatgaaaaaattgtttcgtagaaagtgaaatgataggataataaaatgagtaagaaagaagtacatgtacttctttcttttcttttgaatttagagcaaagtgctttctctatgatgggaatataatcgtatgcaataaagaagtgttattttagttagagaaattaatatttctttcatttgtgggcaaactattcctttgatacgattaatataaattgttctgcttcatgtgagaaaggaaggagaaaatatgagaaaaataattttagcttcaggatcacctcggaggaaggaattgcttgagttagctagtgtgccatttgaaatcgttgtaagtgaagtagaggaaacaattggtgcatattcatcgccttctgatattgtaatgtcgcttgccttgcaaaaagcatcagcggtggcagaaaataatagtgatcacattgtgttaggtgcagatacaattgttacatatgagtcgcgtattcttggtaagccttctaatgaggatgaggcgaaagagatgttacaattactatcagggaaaacacatgaagtgtatacaggtgttgcgattatagcaaaagaaaaaacggttactttttatgagcgtacagaagttacattttgggagttaacagaagaggaaattgatacatacgtcgcgtcgaaagaacctcttgataaagccggtagttatgggattcaaggtaaaggatctattttcgttcaaaatattcaaggggactactatagtgtagttggcttaccaatcgcacgcctcgttcgggaattaaaacaatttgatattgatgtaacccatgcgtaaaattgcatggggttttctttgagagaacaaataaaggggtggagagatgaacggtattcgtgatgttgtaagagaagaacagccacgggagcgtttattgttagaaggtgctggaagtttatcaaatcgagagcttctcgcagtgttactcagaacaggttctaaagaagaaacagttttaaagttgtcagataaaattttacaccaatttgatggcttacgtatgttgaaagatgcaacattagaggagctaattagtatacatggtattgggatttcaaaggcatcgcaacttatggcagcctttgaactaggcagaagaatggtacgtttagaatatcaaaatagatatagtattcgaagtccagaagattgtgcgaaatacatgatggaagaaatgcgttttttacaacaagagcattttgtttgtttatatttaaatacaaaaaatcaagttatacataggcaaacgatctttattggaagtttaaacacgtcaattgtacacccgagggaggtttttaaagaagccttccgtcgtgcagcagcctctatcatatgtcttcataaccatccctcaggagatcccacgccgagccgtgaagatattgaagtaacaaaacgcttagtagaatgcggccagattatcggaattgaagtgcttgatcatattataataggtgaccataaattcgtgagtttaaaggaaaaaggtcatatttaagactatgctttttacttattttgttttataatgtgatttatgagttttttgtagaaatttatctacaaaaaggataaagatataaaaaacgtactgtttttataatataaattaagaaaaaatgagtccgtgaaaacaagaaaggaagataaataatatgtttggatttggtggatttactcgcgatcttggaatagacttaggaactgcgaacacgcttgtatatgtaaaaggaaaaggtgtagttttacgtgaaccttcagtagtggcgttacaaactgatacgaaacaaatcgttgctgtaggtagcgacgcaaaacaaatgattggtcgtacaccagggaacgttgtggcacttcgcccgatgaaagacggtgtaattgctgattacgaaacaactgcaacaatgatgaaatattacattcaacaagctcaaaaatcaaacggtttcttctcacgtaagccgtatgtaatggtatgtgtaccatctggtattacagctgtagaaagacgtgcagtaatcgatgcgactcgtcaagcgggtgctcgtgatgcttatcctatcgaagagccatttgcagcagcgattggtgcaaacttacctgtttgggaaccaactggtagtatggttgttgatatcggtggtggtacaacagaagttgcaattatttctctaggtggtattgtaacaagccagtcagtccgtgttgctggtgatgatatggacgattcaatcattcagtacattaagaaaagctataacttaatgatcggtgaaagaacagctgaagcattaaaattagaaattggttctgcaggcgagccagaaggtatcgagcctatggaaattcgcggtcgtgatttagtaagtggtttaccaaaaacagtactaattcagccagaagaaattgcagatgcattaaaagatacagtagatgcgattgtagaatcagttaaaaatacgttagaaaaaactccacctgaattagcggctgatattatggaccgcggtatcgtattaacaggtggcggggcattactacgtaatttagataaagtaattagtgaagaaacgaaaatgccagttcttgttgcagaagatccattagattgcgtagcaattggaacaggtaaagcattagacaatatcgatcttttcaaaactgctgctcgataatattgcaaaataaaaatcagtgaaattaagagggtgtgaacgtgccacagtttttcttaaacaaaagattaattgttttgttggttagtattattcttctcgtggcattgattggaatctcattgaaagaacggaacagtttaacatggccagagcagtttgttaaagatactgtcggtgttgtagaacgtgtattccaaaagccagcgaaatacgtagctggattcttcgaaaatgtagaggatgtaaagcgcacgtatgaagagaataaagaattaaaagcaaaattagataattatgcaggtctatcagggaaagtaaaacaattagaagatgataacaagaagctacaagagctaactggtaaaaaagagttaaatagcgggtatactgaaattccagctactgttgtttctcgtaatccagataaatggtacgatttaattggaattgataaaggggcacagcaaggaattaaaaaagatatggctgtagtaacttcacaagggttagttggaagagtgaaaagtgtatctcagtttacatcatcagtagaattactaagttctatgagccgaacaaatcgtgtttctgctattgtacaagggcaagagaaaatctttggattgattgaaggttatgacaaagaaaagcaattacttcttttcacaaagattggctctgatgcaccggtagtgaaagatcaactagttgtaacatctggactgggtgatattttcccgaaaggtcttgtaattggaaaaatcgttgaagttcagccagatgcatatggcttaacaaaaacagcttatgtaaaacctgccgctgatttaaatgacgtagagcatattacggttgctaaacgtgcaacaccttcagcgccattagaataggaggagaagaagagatgatgaagatattaaaaagagcagctcttcctcttttgctcctttttgtgtttctatttgaaaatatgtttgctactgttgttccaacggatgtgttttggaaagacagcatagcagcaccgcatttctttataatcgtcttatgttttattacagtgtattatagtccggtccaagggatttattacggactattatttggcttcttatttgataccgtatacacagaacttgtcgggatatatatttttgcttatccgattttagcttatttagtatatagtgtgatgaaagtactacaattgaatttatttattgttgtttctatcatattagctagcgttgtagcactagagtattatgtgtatggattcttaactttattaggacgtactcatatgccagcgtatgtctttttcacagatcgtctcctttctactttattgttaaatgctattttcttattgatagtttgtttcccactgagacgatatatagtgcgtctttcaaaagcgatggaagaaaaagaaaaaaggattttctaattttatgtcgaattgaatcggtggggtgaactttagtggaagaaaaaaagcaacaaaatgtaacgataaaagggacaaaagatgggataacgcttcatttagatgattgttgttcattctcagaattattggtggaattagacgaaaaactttctacacattactacgatggtgatgggcgctctttaattgaagtgcatgtgaaagtaggaaatcgttatttaacagaagtccaacaagaagagattcgtacgttaattcgtaataaaaagaatcttgttgtggattcaattgaaagtgatgttatcactaaagcagaagcaatagcttggaaagaagaaacagaaattgtccctatttccaaaattgttcgctctggacaagttttacatgtaaaaggaaatttgttgttaattggagatgttaatccaggcggaacggttatcgctggggggaatatttttgtcgtaggatcattaagaggaattgcacatgctgggtattatggggattcggatgctgtaatcgctgcatctgttatgaacccgatgcaacttcgaattagtgatgtggcaatgcgggctccggaagagaaagaagacggagcggaggcggcagaatgtgcgtatattaatgagaacaatcacattgttgtcgatcgcctgcaacttctcactcatctcagacctaatttaacaaagttagaaaggggaattgtatagctgtgggagaggcaatagtaattacatctggaaaaggcggagtaggtaaaactactacatctgcgaacattggtacggccctagcgttatctggaaagaaagtgtgcttaattgacacagatatcggtcttcgaaatttagacgtagtaatggggctggaaaatcgtattgtatttgatcttgttgatgtcgttgaagggcgttgccgtttacctcaggctcttattaaagacaaacgttttgatgatctttatttattacctgcagcacaaacgagtgataaatcagcggtaacacctgaacaaatggatgaattaatacaagtattacgtcaagattatgattacatattaatcgattgtcctgcggggattgagcagggatttaaaaatgcggtagctggtgcggataaagcaatcgttgttacgactccagaagtatcctcaatgcgcgatgcggatcgtattattgggcttttagaaaaagaggatattgaaccaccgaaacttgttattaaccgtgtacgtagtcatatgcttcatgaacaggatatgttagatgttgatgaaattgtacgtacattgtcaatcgagcttcttggtgttgtcgaagatgacgatgaagttattcgagctacaaatacaggtgaacctgtggcgttgcaaccaagcggaaaagcagcgttggcttatcgtaatattgcaagacgcttgttaggtgagaatgtaccattacaagcatttgaacaagaaaaggtatcggtatttgcaaaggtgaaaaacttctttggaatccgttaagagcacttcgcacatatgcgaggtgctttcttttttcttcacacgaatatctttctttcttagctcatacatatgtacaaactgtatacaactgtttctaatgaaattagcttaacgaaagaaaggagacagtatgaagaatagacgcgtagaagaaattaaaaagcggattgcaaaaaggaaggccgagcaagaaaggatggaggaagagcagtattttaacggagggaatttcgatagtgaagcggtatttattgaagatggagaaaaggaaatgcatcctttatttcgaaaggaagtctttttcttcaaagttttattatcagcaatattagttctttcggttgctattttatataagaatgctccttcttcattcaatggagctaaagctgttacagaaaaagtgatgaaagaggaatttcagtttgctactgtagcgaaatggtatgaaaagcaatttggaaaaccgctcgtattctattcgccgaacgagaaaaaagaaggaagtattcagcaaaaggattatgcaattcctgcttctggaaaggtaatgcaagggtttcaaaaaaatggccaaggtgtatttgtccaaacagctacaaatgcaaaagtggagtcagtaaatgaagggttagttgtttttgcaggcaagaaagaggaacttggaaatacagttcaaattcaacatgcagatggtacggagtcatggtatgcaaacttaaacgatatgtcagtgaaattatatgattacgtttcaaagaaacaaaaaattggaacggtgagtaatgatacaaatgataaaaacggaaagttttatttcgcgataaaaaagaatgaaaaatttattgatccgatccaggtgatatcatttgattaaatatagggacgttttaacgaaaatttccgtgcatccattattttgggttattattgtcattggtatttttactgcgcgttttaaagagttactactgttattttgtattgttcttattcatgaacttgggcatgcttttgcagcagcacactataattggcgtataaaaagaattcaacttttgccgtttggtggcgtggccgagcttgaggaacatggtaataagtcattgaaagaggaacttgttgtcgtaattgcaggaccgattcaacatgtttggatgatgctggtaggttatatgttgttcgaagtcggttggctgaatacagatttatattatttctttatgtggaataatataattattttagcatttaatttactccctatttggccgttagatggcgggaaagtattgtttaatgtattatcatatcgtttcccttatttacaagcacatgaaaagatgatgcaattgtcatgtgttttttttggtgtaatattaggatggcagttactctggaatagtaacaatattatgatgtggatactactcatatttttagcagtgtcattatatcaagagtggaaacaaagacggtatgcatttatgcgttttttattagaacgttattatggaaacaaaagaggaatcgaaaagattgcacctattgaagtgcaaacggaagatcgtttatatacgatctttacaaaatttcgtagaggatataagcattctattatcgtccgtggaaaatataaagagcattacacattggatgaaaatgaattgctctatgcatattttactgaaaaacgaacaacttcatcagttgaagaattaatcggttagtgttgacgatagcactaaccttttattattgtaaaagcaaagaagattataaagtgaggaaataattttgaaaacgttatatgtgaattacgctggttcggaaaagcgcgttgcaattgaagagaagaaaaaaattgttgagtttttatggaaacgtaatgaagagcaagagattgttgggcatatttatgttggacgtgtcgtaagaacaattgctggaatgaatgcagcttttgtaaacatcggtttagaaaaacatgcttacctttcatacgatgatgtaccatcttcttatcgtatacatgaagggcaagcgatactcgtacaagttgtgaaagaggcaattgatacgaaagggcctaaattgacagcgaatatagaatttaccgggaaatatgtcgtttatatgccgtttgatgagatgcgcgctgtttctcgaaaaataaaaaataataaaagaagacaacagttactccaaattgaaatagagggaacggggggatacattttccgctctgcttctgaaaaaggagcaattgaagaaatacaagctgaaatgcaagggttacaacagttgtatgaagagttaaaaagaaaagagggccaaggaaaggcgccgttattacttcatcgaccggcgacctttttagatcgtgtatttcaagagaatccaattgaaaccattgaaaaagtagttgtagatacaagaagtatagtaaaagaattagaagacaaagttggaaaagaaaaagtatctttttataatgaaaagtcttcgatgtttaaccattttggaatagagcgtgaaattgagaaagcactccaaaaaattgtgtggcttccaaatggtgcttatttaattgtagaacaaatggagacgatgactgtaattgatgtgaatacgggcaagtttacgggaaaacaaaatttacaagatacagtacttcgcacaaatgagatggcagctgaagaaattgcacgccaattaagacttcgtgatattggtggtatgatattaattgattttattaatatgaaaaaaagagaagataaagaaaaggtaagagaatgtcttatagctgctatgcaagatgaccgcacatatacaagggtgctcggctttacggagctagggattttggaaatgacacgtaaacgtaaaaagcattctttacgggacgtattattaaaagagtgtgtaccttgcaaagcgacgggttatgtgatgtcgcatgaaacaattgcgtatgagttagagagagaactaatcacatatggcaatatagaagatgaagcggtattaatcgctgcgcctaaagaactgcaaaaacagtttttgcaaaaagaattacaaaaaaatattccatttgaaatttatttcaaagatgataatatcgaaaagtatgctatcgttcgttttggaagtaaaaaagaaattgtagagcggaaaaaatagttagcagaacatttattgacaaccgtctatgattcatgataacatctttatgttatagtttatagcacctaaacggctatatgctacaaccgcacaagacaggttccctaaaggcatttatgtctacctcgtttttggcgagtcttagtaattaagaggaggtgcaagtatgtacgcaattatcgaaacaggtggaaaacaaattaaagttgaagctggtcaagcaatctacattgaaaaattagatgttgaagctggtgaaactgttacttttgacaaagttcttttcgttggtggcgaaaacgttaaagttggtagcccagttgtagaaggtgcaacagttactgcgaaagttgaaaaacaaggtcgcgctaagaaaattatcgttttcaaatacaaagcgaaaaagaacaatcgtaagaaacaaggtcatcgtcaaccttacactaagctagttgttgaagctatcaacgcttaattctggttaacatgattaaaattacgataagtcgcacgaaattaggaagtatccaatcatttaaaatgactggacatgccgattatgcgccacatggacaagaccttgtctgtgctggaactacagcggttgtgtttggttctataaatgcagtggaagaactttgtaatgtgcaagcaactattgaactcggaagtgatggcggattcttaacatatgaattgcctaatgatttagacgttcatacagcagaaaaagcacaaacgcttttagaaggattagttgtttcgcttaagacgatcgaacttgattacggaaagtatatccgtttaatagaaaaagtgcaggaggtgtaacgtatgttaagattagatcttcagtttttcgcatctaagaaaggtgtaggtagtacaaagaacggtcgtgactctcagtcaaaacgtcttggtgctaaacgcgcagatggtcaaacggttacaggtggttcaattctttaccgtcaacgcggtacaaaaatttatccaggtgttaacgttggtcgtggtggcgatgacactttatacgcgaaagttgacggcgtagtacgctttgagcgtcttggtcgtgaccgcaaacaagtgagcgtatatcctgttgctcaagaagcataagaactcacggaaaactctaacctgagtgcaggttagagtttttctatattaaggggtatctaaatgaatgaaaaatggacaattatagatgcattgcgccattcaagacatgattggctcaatcgtatgcagatggtgaaaggaaacctttcccttggaaaagtggaagaaattcatagtctcatcgatcgttttgtccaagaagcgagacaagaatccaatctgatggggctatcaatgcctttattttcagagtggattttaacatataattggaaacagcagccgtgcttattggagtacgaagtattagggaaattacataacttatctcacttagatgagactgtatgtacatggacgaatcaatttttctcgatgcttcagcatagtttagacgtatatgttgaaaattatgtttgtatcacaattgaatgtgacgcggataatgctcgtttcttttttgattttcgtggtaagctaacgagtgtagaagaactacagaattggcttgcgacccaaaacaataaatggtattccatttcttatacagtgcgagacgaagaagtctcagttatattacaaccaattgaaaaaagtgtggtgaaataatgtttgtagatcaggtcaagatatatgtaaaaggcggcgacggtggtaacggtatggttgcgtatcgtcgtgagaagtatgtaccaaaaggtggcccagcaggtggcgacggcggtaaaggtgcagatgttgttttcgtagttgaggaaggcttacgtacattaatggacttccgctaccaacgtcatttcaaagctgatcgcggtcagcacggaatgagtaaaggtcagcacggacgtaaatctgaagatttacttgtaaaggttccaccaggaacagtagtaaaagatgaaaaaactggtcaaattcttgccgatttagtaacgcatggacaaactgctgtaattgcaaaaggtggccgcggtggccgtggtaactcacgttttgcaacagctacgaacccagcgccagaaatcgctgagaacggggaaccaggtcaagagcgtgatgttattctagaacttaaagtactagcagacgttggacttgttggattcccaagtgtaggtaaatctacattattatctgttgtatcatcagcgcgtccgaaaattgcagagtatcacttcacaacaatcgttccaaatcttggtgttgttgaaactggtgataaccgcagcttcgttatggctgaccttccaggactaattgaaggcgcacatgctggcgtcggacttggacaccaattcttacgtcatattgagcgtacacgtgtaatcgtgcatgttattgatatgtctggtttagaaggccgtgatccatatgaagattacgtaacgattaataatgaattaaaagaatacaatcttcgcttaactgagcgtccacaagttgttgttgcaaacaaaatggatatgccagatgcagaagaaaacttacaagcatttaaagagaaagtgggagacgaagtaaaaatcttcccaatctcagctgtaacaagacaaggtgttcgtgacttattgtttgaagtagcgaacttaatagaaacaacaccagaattcccaatacatgaagttgcggatgagtctgatacaagtgtaatgtacaaatttgatactgaaggtgttaaatttgaaattacacgtgaaagtgatggcacgtttgttatctctggttacgatattgagaaaacattcaagatgacagacttctcacgtgatgaatctgtacgtcgtttcgctcgtcaaatgcgcggaatgggtattgatgaagcgcttcgtgcacgtggtgcaaaagacggagatattgtaaaaattcttgaatatgaatttgaatttatcgattaagactgccgaaatacggcagtctttttttatatcgtaaaaatcggatttatataggaaaaaatccccactaattaaattttcaatttataataaaaaggggagtggttttagaagaatttttttatggggagaaaacgaacatgtataaaatattaattgtagaagatgatgagaaaatcgcgggaatattagaagagcatttagaaaggtatggctatcaatcatttagagcaagtgatttacgtcaaataaaagatgagtttgtaaaagtgaatcctcatctcgtgttacttgatattaatttaccgtactttgacggtttttattggtgtcgtcaaattcgtactgtatcgaatgcaccaattatttttgtttctgcaagaacaggagaaatggatcaagtaatggcgattgaaaatggcggcgatgattatattacgaagccattccatttagatatcgtaatggcaaaggtgaagagtgcacttcgccgtggttacggagagtatgcttctgccgctgagagtgattgtttaggtgtaaatggactgttgttattcccgtctcagcatattgttgagtggcaaggacaacaaactgaactgacaaaaaatgagttttacttattagagtgtttaatgaaacaggtgaatcaatatgtaacgcgcgaagaactgttagaagctctatgggatgaagtagcatttgtggatgataatacattaaccgtaaatgtaaaacgtgtaaggaagaaactagaggagttaggcattaaaaatgcaattgtaacgaaacgtggatatggttatgcgctttttacggagtggggcgaagggcatgaaggttaaaaattaccttatgggccgcttttctttaattctttcttatattgttagcctttgtttatttgggctcgttttacagctgcaaagtcttttagaaaagaaatccattgattggagtacgtggttatatggacttttattaggaacagttgtgtttactgtatacctcatttacgattaccgaaaacggagtgtgtttttaaagaggatcgaaaagtatgttactgatggaaatacattacatgactctttacttattgatgaatcttatacatcagagcaagaaatggtcgttgaatcttttacgttattaagacagcaatatatgaatgaagttcataaacagcatgcgaaagagcaacagcaaatgatatttatgaaccaatggattcaccaaatgaaaacaccagtatctgttattgaattattgctgcaaaagtttggcaaagagcatcgtgaggcaagagcaacagttgaaagtattcgtgaagaaaataaccgtatactaaatggtttagatttagcgttacatatggcaagactagagcagtttgcgaaagattataagatagaagtagtaaatgttatagatgtcgtgcgaggtattattaatgaaaatcggaaatcctttattcaatcgtctgtatttccgaaagtgatgtttgaagaagatacttgtatggttgcatctgatagaaaatggctgagtattgctataggtcaaattgttgtaaacgcaatcaagtatacaaaaatttcagcggcagagaaaaaagaaattcaatttcaaattgaagagaaaaatcaaaaggtgttattacatattaaggacaatggaattggtattccagagcaagacgtaaagcgcatatttgatccattttttacgggaataaatggacgtaaaacgagagaagcgactgggatgggcttatatattacgaaggaaatttgcgataatttacatcatggaatgtatgtccaatcggctgaaggagaagggacaacattcacgttccaatttgcaaaagatgaagaatatcatacattgatgagaaaaatgacaaaactgtaagataacaaaacgttttgtaagggaaatcactcgtttctttttcttatttttcttatagtaaatgtaagaagaaaacacgtagggggattagaaatgagtgttcttgaagtaaaaggattaacgaaggtgtaccaatcaaaaggttcagtagcgacgactgctttaaacgatataaattttaaaatagaagaaggcgaatttgtagggattatgggtccttcaggaagtgggaaaacgacgcttttaaatttattagcaacaattgataagcaaacttcaggtcatgtgcttgtaaatggtgaagaaattaatcaaatgcgtgctgcaaaattagcggagtttcgccgtacacatttagggttcatcttccaagattttaatttacttgatacgttatccattaaagaaaacattattttaccacttgtaatggcgaagaaatctgtaaatgaaatcgatgcgaaagtactagaaattgcgaagtttttaaacatcgaagaaattttaaataaaaaagtatacgaagtatctgggggacaacaacaacgtgcagcagcagcgagagcaatcattcatgaaccgacgttaattttagcagatgagccaactggaaacttagactcgaagtcagcaaaatcgctaatgggtgctctgcaagatttacacgagcaaaagaaagtaacgattgcaatggttacgcacgatccagtagcggctagttattgtgaacgtatccttttcatacgcgatggagaaattttctcggaaatacataaaggaagaacgaaacaagcctttttccaagaaatcctggacgtacttgcgatgctaggaggagaatatcatgaactttcgccagctcgcgcttaataacgtaaaaggaaattggcgtaactataaagcgtttcttataagtagttgtttatcgattgtcgtatttttcatgtatgcttcttttatttatcatccagatgtcgtaagcggtaatattagtatgagaaagatgatcacaaaaggattagaatcgatgaattatattgtggtcatcttctcggcactctttattttatatgcaaattcaacgtttttacgagcaagaaaaaaagagtttggtctactaacattaataggcggaacgaaatcgcagctcggccgaatgattatattagagcaactgatgttaggtagtattgcaattgtagttggtattggggttgggatgctttgttcaaaattatttttccaagcgttaagcgtattattaaaaatagataagacacttccacttgtttggaatagtaaagcagttcttattacagctggtgtatactttattctatttttaatcctatcattgtttagtgtttggacagtaggacgcttgcaaattattgatttattaagagaggcaagaaagcaaaaagtagagccgtttgcatttacatggttatgtgtagttggtataggatgtattattgttgcatatgtacttagcttccaagtaacgtttctgaatttcctcatcctttttttaccggtggtgggactgacaattggcggaacgtatttactatttacacaaggtagtacagttgtattaaaagcattacaaaaaagaaagcaatctttttatacgtacccaaatatgttcgtccttagcaaccttatttataaaatgaaagataatgctcgttttctatttgtaatttctatcattacggcggtagtatcttcagcggtgggtacactgtacgtatattttgaaaatatgagtgcgaaaacggtagaacttacaccacatgctatttcatatgaggaaaaggggttaaatacgcataaccttattaatgaagaaaaggtacaggagcttgtgaagagacacgggtttgaagatgcgcgaaaagtaacatacgttaaactaccggcaacacagaaaataacgttgtttaatagtgaacatgaagtaccgatgacgattatttcagaaaaagaatataatgcagaagtgcgcaaacaaaagagagagcaacctacagaagttcataatgcaccaggtagtgcaacgatggttatggttgatatgtcaaatgaactgatgaagatagatcgtacgaaaccgtatgaatttacaattaacggacaaaagcagtctgttcaattaaataatccaacgcagtattctgtttttaatgatagtgaatatctcattgtaaatgatcaagattttgagaaatatgcaaaactcgtaccagatgaagaaaagtcgaaatattacggttattatattgaggattggaaaagtacagaaaatcttgtattagatttgaaaaatgaaattgtaccagaaaagcaaggggaattgagaaattcagtgtttgcgtataaggatataagagaaggtggagcaattacaatgttcatcggtttcttcgtagcggtactgttcttcttcttcgcttgtagtatgacatactttaaatggtttaacgataaagaacaagatcgtattcaatttaaatcgttaaagagaattggtatgacagataaagaaattcgcaaaattgcgattcgacaaatgggagttatcttctttatcccaattttaatcggttccattcatagtggatttgctcttcatacgttagggaaaatgctttatattaatttatggaaatcaggtgcgcttgtaattggagcatacattttagcttctgccatttactttatgatcgcgcaaagaggatatttaaaacacgtaaaaagctaggggaacctctagctttttgcctatgtagtaagttacaggaggacgatagatgaacattcggcaactagcgctgcaaaatataaaaggaaattggcgtaattataaagtgtttttcttaagtagttgttttgcaatatttgcttcttacgcatatatgtctgtcattgtgcatccatatatgcaagagacgatgtggtatcaaaacgtacgctggggacttatcatatgtaatgttataatcatttcttttttcgtcatatttattttgtactctacttctattttcatagaagcacgtaagaaagaattagggttatatatgttaatgggagcaacgaagtctaacgtaataggagtgattatgaccgagcaaattttaatcggggtcttcgcgaatattttcggtattgggcttggtatgatatttttaaagctcttttttatggtatttagtatgttactggggcttccgaaagaactccctgtcatatttgacgtaagggcgattggtgtaacatttattacatatatggtcgtttttattttgttatcttttataagtgctttacgtatatggaatataaaaatcattcggttattgaaagaatttcgaacagataaaaaagagaagaaaacatcaaagtggctctgtttattcggttttgcttgtttagtgggcgggtatgcattggcgctacaagtgacgatggctacgatagcgatatactttttccctgtgtctatacttgtcttttttggaacgtacttttcttttacacatggagctacccaagtgttagaaataataaagagaaataaaaagattatgtatacatatccttatttatttatagtgaatcaattgtcacatcgaatgaaggaaaatggtcgctttttctttctgatgtctatggcaacgacgtttgtagttacagcaacaggtacggtgttcttatatttttctagcatgcaagatatgtggcgaactggaggggtacactcgttttcgtacatagaaaaaggtatttctactcatgaagtctttgaggaaggtgcggttgaaaaattactgcatcaatatgggtatgacgattttcaatatatgagttttgttggagtgtatgcatcctttcagtctagtaaaggagaaacaacaatagtaccgcttataaaagaaagtgaatataaccaagaagcaaggaaacaaaaacaaaaaatgtatcgtcctaaaaaaggtacagtgacacttgtttattataataaatacaataattcgaatgtatataatcaaaaagagattgaattgcaagtaatgaatcaaccatatcaattcgtatttaacggtcagaaagaaggggttcaatttaaccatcacccttcgtacattaatggtctgttcttcgttatgaatgatgaagattttgatagtatagcaaatcaggttcctgattctgaaaaaatgatatatagaggctacacattaccaaatatcgaaaagacgaagaaattaaatgaagatttacggaaacatatgaaacaagataataataatgcatttcgaagcaatatggagttgtatgtaaatgtgaaagaaggcggcgatattactctatttgtaggctcatttattagtatattattctttcttacttcatgtagtatcgtttattttaaatggttccataatattgcatcggaccgaaagcagtatggtgcactctctaaacttggaatgacgaaggaagaagtatggaaaatttctcgttggcaattatgtatgctattttttgcgccaattatagtagggagtatgcatagtgcagttgcgttatatacgtttcataatacgctttttatggatggatcattaagaaaagtaggtttgttcattctgttttatatcgcagcatgtatcatttatttcttcttcgctcaaagagaatataagaaacatttagactagcgaacgctagtctttttttaatattcgaaatttacatagaagaatataaaaaagtatggtataacagtaagaaaacgaaaaagaggggaaaagacgatgattcgagtaggatatttaggaccagaagcaacatttacaaatatggcggtgagtcgtttttttccggaagcagagcatgtaccatatcgaacgattccagattgtatagatgcagctgcaaatgaaaatgtagacttcgcagttgtaccgttagaaaatgcaatagaaggttcagtgaatataacggttgattaccttgtacatgagcagccgctttccattgtaggagaaattacagtaccaattcagcagcatttacttgtacatccgcagtatgcagaagtgtgggatgaagtatatgcagtgcattctcatccgcatgccattgcacagtgccataaatttttaaatgaagaattaaaaggagtaactgttcgagatatgacatctacaagtgctgctgcgcaatatgtgaaagaacatcctgaagagaaaattgccgctattgcaaatgaagcggctgcagaaaaatacggattaacaattgtgagacgtagtattcatacgcataaaaataatcacacacgtttcttggtactccataagaaaaagaaagcagtactcccgaataacggagagaatcgcggagagaaaacgacgcttatgataacgttacctgcagattatgcaggtgccctatatcaagtgttatcagctttcgcatggagaaaattaaacttatcaaaaatcgaatcgcgtccgatgaaaacaggtcttggaaattactttttcttaattgatgttgataaagcatacgatgacgtattattgccaggcgtaacgatggaacttgaagcactcggtttttctgttactgtgctggggagttattcttcttattggttgtaagatgtagatggaatgttggtatttgtctaatcgtcaatatcatttcattgcctaatatattttttaatagattaataaaatcccacctgcagaaggtgggattctttattttaacttcgcaagacgatcttctaactgaccacgccaaatatcagctagttctggaacagcaagaattttttcaatgccatctttatcttttctattatgaaaataaatttcgttagagaacaagacagaaacattgctcggttgacgttctagtaatgtaattttagaatctttacgtacagtaccttcttgaagaacgcggcataggtagcctgtaaatccagttgctacaatgcgtggcagtatgccagggatgccaagacgttttgaaattgtgctacaaggtactcttgcttgtgtcacttgaatgattgtttcacctagttgatatgtatctccgatgcaaacatcacgctctaacatatttgttacggtaatgttttcgccaaatgtggaagctggaagcgtagtttgaaattcctcttcccatagtgcgtaatgctcgtgtgggtacacacaaacagcacgatcaggaccgccgtgatgttttaaatccgctacgtcatcaccaagaaatccgtcttttgagagaaaggcctcttctgtaggatctttacatatacctgttatcatttctttatcttcgccatatttcatttgtttcggtttgccaatgctaaagtgaacgagttcaattcccatgtttgatctcctttacgattgattacaatattatagcattaaaaaagcacagaggatgataaaaaactctgtgctttacattaataaacgagaaatcctgctttatctaacgcctcacaagcagcatctaacttttctttagaatctgcttcaattgtatgtaagtgaataccgtctgttagttgcgatagataggaagcatttgtgttttcgattttttgtaaatattgctctacatcaaatcgattacttaccataattgatgctgttaagtcgccgtatacaggatgctcaacttttacatctttaattgtaacgccatggtcaacaagcattgtaagttcttgacgtacttctgctggtttgtgctggcatacgattacgcgttcaaaagcttgttgtttctcttgtggttttaaatataaatagccttgggcagtcgcaataattggttcgtttcgtgctttaagcaaggaaatatcttgcacgataacttgtctacttacgtttgtcttcttcgatagttcattcccagataacggctcatttgcagcgagaagccactgaaggataagctgtcgtctttcttcgcctaaaatctttttttgttcattttgtttcattatgatttaacacctctataaaattgatttccaattgtgtgtagtgcatgaatagtagtatcaatttgatctttcgttgtttgttgtccgaaagagaagcggacatattgtttggcctcttcatacgtttttccaattgcaagcatagttttcgaaggttcttgtttaccgacttggcaagcacttccggtggaaatggcgataccatggcgattacattctaacatagtatattgaccttctattccttttattgtaaccccaacaatatgtggtaaacaagaagtagaatgaccttctacttcaatttctagcggaagtgtttgtatttgccctaaaaagtaggagcgtaactctttaaaacgtaaactttcttcccattgagtttttaatatattttcagcagctgttaaaaaagatgcgatgccgggaacgttcactgtacctgggcgaaatcccttttcgtgagaagttcctggaaatacttgctcccagcgcgattgcggatttatgtagcaagcgccgacaccttttggtccgtatattttatgtgctgaaacagaaagactatcaatccccatctcaaaaacatggataggcagtttaccaaacgtttgcacacaatccgtatgaaataaaacattatatttttttaaaagtgccccaatttctgtaatgttttgaacggttccgatttcagagtttccatgctgtatacttgctagcacagtatcttctgtaatagctgcctctaaatctactaaacaaatgagtccatttttatcaacaggaatttcagtgatcgtatagccttttgattttagagattgaaaataacttcgaatggatgcatgttccataggtgtcgtaataatatgcttcttattttgggcatttagaagtgattggatcgcaagatagttcgattccgatccaccacttgtgaaaaatactccttgttcttttcctccaatcatttccgcaaatgtttttcggcaaacttgtaataaagaagaagccgttcctccaatatcatgtaagctttgttcatttccgaagtattgcgacgctgctttcatatatgtttgtaacgcttcctcgctcataggtgtagtagctgcatagtcaagatatatcatcatgtaagttcctctctctagtaagagttacatttcttttactttttaaatggtagtgaaaataagaattataaaaaaactcttgtcattattttaaaattatgtaaatataggtgtcaagacagttgaaaagtgtaaagtaggaggcaacaattatgccaagcgcagatgtcttaattattggaagtggcgttgcggcacttcgtgttgcaaaagagatttgtcacgaaaagaatgtgattattatcacaaaggagacgaaacgtaataataatacacatttagctcaaggtggaattgccgcagcggtagctacatatgacaatcctaatgatcattttgaagatacattagtagcagggtgtcattataacaatgaagaagtggtccgttatttagtcgaggaaggaccgaaagaaattaataaccttattgagaatggaatgaaatttgatggagatgaaacaggtcctcatcttggaaaagaaggagcgcatcgaaaacgtcgtattttacatgcaggtggcgatgcaacaggaaagaatttattagagcatcttattcaagaagtagctccatacgttacggtagtggaacaggaaatggtgctcgattttattatagaaaaagataaatgtgttggggctttaactcgcaacaataaaggagaattgaaacgttacaatgcagattgtacggtgttagcttcaggcggtattggcggtttatacgcctttacttctaatgatgagacgattacaggcgatggacttgcaatggtgtaccgtgcaggcggagagcttgtagatttagagtttatacaatttcatccgacgatgttatacgcgggtgggcgttgttccggcctcgtgtccgaagctgttcgcggagaaggagctgtccttataaatggaaaagggcagcgttttatgatggatatacattccgaacaggatctagcacctcgtgatgtagtcgcacgggctattcatgaacagctacttgcgggtgaaaaagtgtacttaaacatcgaaatgattcaaaactttgaacaacgctttccgaccgtgtcatcgatatgtaaaacaaatggagtcgatataaataaaaaacttattccagtcgtgcctggtactcattttcacatgggcggcgtgaaaacgaactgtgatggagagacgtctattccgaacttatacgcagtcggtgaagtagcttgtaacggagttcatggtgcaaatagattagctagtaattcattattagaaggtcttgtgtttggaaaaagaaccggacgacacattttatctagagagacaaaagaaaaggtgaacatgctagctgaaaaggaaccaaagttcatcgttctgaatcatttaccgacgaaagaagaaatacaaaaatgcatgatgaaatatgttgggattgtgcgaacagagcaaagtttatcttatgcgaagagatggtttagtaagtatggtgttcgaaatatgatattacaacatgatgttcttacgaatgaagagataacacttattaatatgttaacggcttgtgagcttatagttgtgtcagccttgcaaagagaagaaagtattggcgggcattaccggagtgattatccagatagaaatataggaaagaaagagattgttcgagtaaagagaaaattacaacttgtgtgatgaggggaagagaggctttatgaacacgataaaagttaaagaagcattaaaccgattttttttagaagatataggagaaagagatgtaacatctcagcttatttttccagataacttgctttcgaaaggaacgtttcttgcgaaggatacaggggtctttgcaggatgtttagtaattgaatcaggatttaaattaattgatgagagaattgaaatagagcttcataaaaaagatggggatcttgtagaaaaaggagaaattattgcaacagtgcaaggtccaatcgcatcgttattaacagcagagcgcgttatattaaatgttattcagcgtatgagcggaatagcgacgatgacgcgtaaagcggttcttgctttagatagcagtcatactcgcatttgtgatacacgaaaaacgatgccaggactacgtatgtttgataagtatggagtcgtgtgcggcggtggatttaatcatcgcttcggtttatatgatggtgtcatgattaaagacaatcatattgcgtttgctggttctattacaaaagctgttacatcagtgaaagaaaagttaggacatatggtgaaagtagaagtagaaacagaaactgaggaacaggtgagagaggctgttgctgctggtgcggatattattatgttcgataatcgtacgccagatgaaatccgggagttttcaaaaattgtaccaagcgctatcgttacagaagcttcagggggcattacaattaaagatttatcaaaatacggaaaaacaggggtagattatatttcacttggagcgttaacacattcagtgaaagcacttgatattagtttcaatattgaagagtaaggaaagtggcttagagggggagaaacgtatatgagtattttagaacaagtacagtcaattgaaacgatgttaccagagcgttattacacgatgtcaacggaagatatggaaaagcgtgttcgtgaaattaaagagaaaatggggaaaatgttattcattccagggcatcattatcaaaaagatgaagtggtacaattttcagatgcagcaggggattcacttcagcttgcgcaagttgcagcgagcaataaagatgcaaaatatattgtgttttgcggggtgcactttatggcggaaacagcagatatgttaactacagatgatcaagttgtcatcttaccagatatgcgtgcaggttgttcgatggcggatatggcagatattgaacaaacagaaagagcatggaaagagctcacgaaattatttggagatacgatgattccgttaacatatgtgaactctacagctgcaattaaagcgttttgtggtcgtaacggaggagcaacagtaacttcttctaatgcaaagcaaatggtatcttgggcgtttactcaaaaagaacgtctcgtctttttaccagaccaacatttagggagaaatacagcgcacaatctaggtatcccgttagataaaatggcagtatgggacccacacacagattcattagagtacgatggggatatagaagaaattcaagtgattttatggaaaggacattgttctgttcatcaaaattttacagtgaagaatattgagagtgtacgaaaaaatcattctaatatgaatattattgtacatccagaatgttgctatgaagttgtagctgcttcagattatgcaggctcaacgaaatatattattgatatgattgaatcagcgccatctagtagcaaatgggcgattggtacagaaatgaatttagtaaatcgaattattaagcaacatccagataaagaaattgtttcgcttaatccatttatgtgtccgtgcttaacgatgaatcgaattgatctgcctcacttattatggacacttgaaacgatagaaagaggagaagaaattaacgttattagcgtagacaaacaagtaacggcagaagcagttcttgcattaaatcgtatgttagagcgtgtgtaaagcaacggtattcccgttgctttttttcatacatataatcataacgagaacgaaatgggcatacattgttttgaagaaatcattgtggttctttatgcttattccacttcgaatgatattgaaaatcgaagaagtgataaaagtgaaaagaagttaatgttatttagaaagagttacttcaagagatttgttacttatagataagttatacaggagggggaaaatttgaaaattcatatcgtgcaaaaaggggataccctttggaaaattgcgaaaaagtacggagtggattttgacacgttgaaaaaaacaaatacacaacttagtaatccagatttaatcatgccaggtatgaaaattaaagtgccatcaaagagtgttcacatgaaacaacaggctggagcaggttcagcgcctccaaagcaatacgtaaaagaagtgcagcaaaaagaatttgcagcaacaccaactccgcttggaatagaagatgaggaagaagttacgtatcaatcagcaccaattacacagcagccagctatgcaacaaacacaaaaagaagtgcaagtaaaaccgcagaaagagctgcaagtaaagccacaaaaagaagtacaggtgaaaccacagaaggagatgcaggtaaagccgcaaaaagaagtacaggtgaaaccgcaaaaagaggtgcaaaaagaacagccaattcaaaaagaaaaaccgtctgttattcaaaaaccacctgtgatagaaaaacaaaaaccggcggaaaaagaaaacacgaagttttcggtaaatgtattaccgcagccgccacaaccaccaataaaaccgaaaaaagaatataaaatttcagatgtaataaaaaaaggaagcgagttaattgctcctcaaattagtaaaatgaaacctaacaatatcatttctccgcaaacgaaaaaaaataatataatatcgccgcaagtgaaaaaagaaaatgtagggaatatagtgtcgccgcaagtgaaaaaagaaaatgtagggaatatagtgtcgccgcaagtgaagaaagagaatgtagggaatatagtgtcaccacaagtgaaaaaagaaaatgtaggaaatatagtgtcgccgcaagtgaaaaaagaaaatgtagggaatatagtgtcaccacaagtgaagaaagagaatgtaggaaatatagtgtcaccacaagtgaagaaagagaatgtaggaaatatagtatcgccaaatgtatcgaaagaaaatgtagttattccacaagtcataccgccaaatattcaaatgccaaatataatgccaatcatggataacaaccaaccaccgaatataatgccaattatggataacaatcaaatgccgaatatgatgccaattatggataacaatcaaccaccgaatatgatgccaatcatggataacaatcaaatgccgaatatgatgccaattatggataacaatcaaatgccgaatataatgccaattatggataataaccaaatgccgaatatgatgccaatcatggataacaatcaaatgccgaatatgatgccaattatggataacaatcaaatgccgaatataatgccaattatggataataaccaaatgccgaatatgatgccaatcatggataacaatcaaatgccgaatatgatgccaattatggataacaatcaaatgccgaatatgatgccaatcatggataacaatcaaatgccgaatataatgccaattatggataacaatcaaatgccgaatatgatgccgagtatggataacaatcaaccaccaaatatgatgccctatcaaatgcccatgatgccgccgaatccgtattatcaacaaccaaatccatatcaaatgccatatcagcaaggagcgccgtttggaccgcaacatacgtctatgccaaacccgaatatgatgccaatggataataacatgccgccgcttgtgcagggtgaggaagattgtggatgcggaggagaaagtagactatatagtccacaaccaggcggtccgcaatatgcgaatcctttatattatcaaccaactcagtctgcatatgcaccacagccaggaacgatgtattatcaaccagatccaccaaatgtatttggagagcccgtttcagaagaagaggacgaagaagaagtttaaaaaggcgggagtattcccgccttttttgcattcctgttaattaagaaaaggcagtttttttatgaagtgctagaaaattcccagtgaaatattaacagtgtaaaaaccttctctgttactcatcataagagggagcttttcagtagagaagctcattctaacagagggggtttttgtattgaatacgaaagtaaaagtgattgctgcttctttgttagttactagtgcattagctgcatgtggtacaccaaaaaacaatgcaatggatggacgtaactacaattacgagcgtacatcttataatgatacacaccagtatcgtgataatgtgacgcgtaatgatcgttatacagattatgtaacatatagaaatggtcgtaacgatacaggatacaattattaccgtgatgtaaattacaatggacaaattgctaatccgcatccaactcgtaatattacaatgaacaattcatacattaacaatgatggtaaaacagctgaaagaataacaaatcgtgtgaaacgtatgaataacgtagaccgtgtgtctacagttgtatatggaaacgatgtagcgattgcggtaaaaccacgtaacacagtgacaaatgaaacggcgatggcgaacgaaattcgtcaagctgttgcaaatgaagttggaaacagaaacgtatatgtttctgtaagaaatgatatgtttactcgtgtcgatgcaatgagtacgcgtctacgtaacggtacagttacaaacgattttaatcgtgatataggaaatatgttcagagacattcgttacggtttaactggtacagtgcgatagcaaaacaaaagaggaagggggagcccttcctctttattcattttcgtcttgtaaacgacgttttttaataaaataactaacggaataagaacctaaaaagcatatgaagagaataccacctgttaaaatagcttcaaatagggggctttctggactgaaaatgatataaataatagccataacgattcctacaataagagagcgtaaaacaattttgtaataaggagttaattttatctccttttcactttcttctacatcaattgaaacacttaactgtaaataactaaggattatactcgtaagaataaatactagccataatggagatttcgtaatttgatctattccttcagtgaatccgatatagcctaaaataccgattataccaagtgattgaaaaagaaaagcaatacgtacgttttttaacgtttgcagaatgagacgttcatcctttatttttttcacactacccatctcctgtttattatgatttcgctgttacattaattgtaacatatacattacatttatcaatttataatttacatataatttgtttagatgaaagaggaaataaaatatttttataaacatgttgcacttatactttattaatgttatattagcaaagcgatgagctaatttacgtaagacgagagatatgcttaagtgctaaacacgcgaatgtggtcgcctggtctctcgccgtaaacgcatcaagacgcctgctttgcaggcgtctttcattttatataaaagtaaatgatacatgcagatgaggtgaatccttatctgcattttttatattttcgaaagaaatataatatggataaaacccccatttccggaaaaactactaatgaaagtatgatcttgcctaaaagaggtgaacggaaatgaaatggatactgattgcgatgcaagctttcgttataatgttttgtttcgtttatgaaacgaatgtgaaggcggaagggccagtaccagaagtgacgaaaaaagaacctgaggttacaattttattagagcgtatgtatgttgatggcgaagtaagcgaagaaatacttacagaaaaagtgacggatttagaaaagtttttacagcagtataaagaatggcagctcgttgatcgtgatgatgtacaaattgtattgcaaaagaaagttgatgatatttctccgttattgaaaacgagcgggtattttggtgtttcagaggaagggatattacaaattttcaaaggtgtgccaaaaaatgataatgcgatccattctttctttcaaattgatatgaaaaagcttgagagctatgaacgtgcgaaattgaaacgtggcattcgtattaaatcaaaagaaggttttgtgaagacgattgaaaaaatgaagcaatacgcagttcaaagtaagaaaaaaagcagctcatggtgagctgctttttttcttatttatttttagctaaaatttcttttgcgatttcatcaattagcatatcttttccgattggattgaatgctttcgtattgaagacttcatttaatacttcatatacgtgattatttttaactgctttattgtctttccaaacggcactgtttttgtagtcttcgtaaactttatcagcttcgccgccgaagtttacaataaacatttggtcaggctggaatgcaactagaccttctagtgatacttgcgccatcgtttgttttaaatccgtaccttttgttgctggaagttttaagtcattaaagatgatgtcaccgtatccgaagctaccgtatacacggaagttttgtggtgtaactgcaacgaacataaagttctcatcttttgttttctctttaatttttttagataaagagtctgctttcttatcgtagtctgcaatccatttgtctgctttcttctcttcgtcaaatagcttacctacttctttaaacttaccacgccagtcttctaagtttgtttctagaacaactgtaggtgcaaccttttctagttgatcataaatttttaattgccggttgtttaaaataattaagtctggttttaaagcagtaacagcttctaaatcaactttaggtgcccagtaccaacctactgcttttactccatctaacttgtctgttaagtgattttggattttatctttatatgtatttgctgtaccaacaggtttatgtccaagaagtaatagttcttctgttgatccagataagtcaacaattctctttggatttactggaattgtagcttcacctttagcatgttttacaacttttgttttcggttgttcttttgctttcgattcttctttttgagaagaacagccaacgatagaaagaacaacaagcataatagtaaataaaataaatagcttacgtttcatcctgatgtaacccctttaattagtattgataatcattatcgacttctgtatattaaggtgctttaacctttctgtcaatggaaaataacagaagtttcaagtggagaacatttgttggggcagtctcgcttttctatcattaaatatgttaaaatggaatacatgatttaagagggagagatcgtattttgtttgaatatgttacaggttacgtggagtatgtagggccggaatatgtcgtaattgatcataatggaattggttatcaaattttcacaccaaatccgtatgtatttcaaagaagtaagcaagaaatccgtgtctatacatatcattatgtgagagaagatattatggcactttacggttttaaaacacgtgaagagcgtttattatttacaaagttgttaggcgtgtctggcattgggccaaaaggcgctcttgcaattttagcttctggtcaaacaggacaggtcgttcaagcgattgagcatgaagatgagaagtttttagtgaaattcccaggcgtcggaaagaaaacagcacgccaaatgattttagatttaaaaggaaaactagcagatgtcgtaccagatgcatttgttgatttattctcagacacagaacgttttgatgagaataaaggttcatcagctgagcttgatgaggcactggaagctctgcgcgcacttggatacgcagaacgcgaagtttctcgtgttgtaccagagttattaaaagaagcattaacgacggatcagtatattaaaaaggcacttagtcttttactaaatggtaagaggtgagtataatggacgaacgtctcctttcaggggaatctgcatatgaagatgcggatttagaatattcattacggccacagacgctccgtcagtatattggccaagataaagcgaaacataatttagaagtatttattgaagcggcgaaaatgcgtgaagaaacgttagatcacgtgcttttatatggaccaccaggtcttggtaaaacgacgcttgcgaatattattgccaatgagatgggcgttaatgttagaacaacttcaggtcccgcaattgaaagaccaggagatttagctgctgtattaacagcgcttcagccaggtgatgtattatttattgatgaaattcatcgtttgcatagatcaattgaagaagtattgtatcctgcgatggaagacttttgccttgatattgtaattggaaaagggccttcagcacgttctgtacgcctagatttaccgccatttacattagttggagcaacgacacgtgctggagcattatcggcaccgcttcgtgaccgcttcggtgtactttcaaggttagagtactacacagtagatcagctttctgcgattgttgaacgtacagcagaagtatttgaagttgaaatcgattcgttagctgcattagaaattgcaagacgtgctcgtggtacacctcgtattgcgaatcgtcttttaagacgtgtacgtgatttcgcacaagttcgtggtaatggaacggttacgatggaaattacacaaatggcattagagctactgcaagtagataaattaggtctagatcatattgatcataaattactgcttggtattattgagaaattccgtggcggtccagttggattagaaacggtttcagcaacaattggagaagaatctcatacgattgaagatgtgtatgagccgtatttattacaaattggctttttacaacgaacgccgaggggccgaattgtaacgccgcttgcgtatgaacatttcgaaatggagataccaaaagtatgacggagatgccaaagctgcttattacagccgggatcttactcatcgttgttggattagcttggaagttcattggaaggcttccaggcgatatttttgtgaaaaaaggaaacgttaccttttattttcctatcattacatgtattgtgttaagtattgtattatcttttattatgtatataataaatcgatttaaataagaaataggtggatatagctatggatataaatctgtttgattttcatttaccagaagaacttattgcacaagtcccgttagaagagcgtgaaacatcaagattaatggtgttagaccgtgaaacaggtgatattgagcataaacattttacggacattctttcttacttacatgagggggattgcttagttttaaatgaaacgaaagttatgcctgctcgtttgcacggtgtgaaagaagatacaggcgcgcacattgaagtacttcttttaaaacaagaagaaggtgataagtgggaaacgcttgtaaagccagcgaaacgtgtaaaagaaggaactgttatctcttttggcgaagggaaattaaaagcaacttgcacaggaactgcagatcaaggtggacgtcagcttgaattttcatatgacggcatcttctatgaaattttagatgaacttggggaaatgccacttcctccatatattaaagagacgctagaagatcgcgatcgctatcaaacagtatatgcgaaagaaatcggttcagcagcagcgccgactgcgggacttcactttacagaagagttacttgagaagttaaagcaaaaaggcgttcagttagcattcattacacttcacgtaggacttggaacatttagaccagtttctgcagacacgattgaagaacaccatatgcacgcagaatattatcatatgtctgaagagacagcggcattattaaatcgtgtgaaagagaatggtggacgtattattactgtaggtacgacatcaactcgtacgttagaaacaattgcaacagatcatgaaggtaagctttgcgccgcttctggatggacagatattttcatgtatccgggatatgaatttaaagcaattgatggtttaattacaaacttccatttaccgaaatcaacattaattatgcttgtaagtgcatttgcaaatagagataatgtacttcatgcttataatgaagcagtaaaagaaaaatatcgtttctttagcttcggtgatgcaatgtttgttgcatctcacgctaaaatgagaaacaaataaaaggagtaagttatgacagcaattcgttatgaatttattaagacatgtaaacaaacgggtgcccgtttaggtcgtgtgcatacgccgcacggttcatttgatacaccaacatttatgccagttggtacacttgcaacagttaagacaatgtcaccagaagaattaaaagcaatggattctggcattattttaagtaatacgtatcatttatggctacgtccaggtcatgaaattattcgtgaagcaggcggcttgcataaatttatgaactgggatcgtgcaatcttaacagactctggtggtttccaagtattcagtttaagtgacttccgtcgtattgaagaggaaggcgttcacttccgcaatcacttaaatggagataaattattcttatcaccagaaaaagcgatggaaatccaaaatgcattaggttcagatattatgatggcatttgatgagtgtccaccattcccagctacttttgaatatatgaagaaatctgtagagcgtacgagccgctgggcagaacgttgcttaaaagcgcatgaacgtccgcaagatcaaggtttattcggtattgtacaggggggagagtacgaagagcttcgtcgtcaaagtgcgaaagatcttgtttcaatggacttccctggttacgctgtaggtggtttatctgtaggcgaaccgaaagatattatgaaccgtgtacttgagtttacaacaccacttcttccagataataagcctcgttacttaatgggtgtaggttctcctgactcgttaatcgatggcgcaattcgtggtattgatatgtttgactgcgtacttccaactcgtatcgctcgaaatggtacatgtatgacaagtgaaggtcgcctcgttgtaaaaaatgcgaaattcgcaagagacttcggtccgcttgatccaaactgtgattgctacacatgtaaaaactactctcgtgcgtacattcgtcacttaatgaaatgtgatgaaacgttcggaattcgtttaacgtcttatcacaaccttcattttctgttaaacttaatggagcaggtgagacaagctattcgtgaagaccgtcttggcgatttccgcgaagagttctttgaacagtatggctttaataaaccgaatgctaaaaacttctaatacataatttaaaaggaggaacaaaagatgaatgcaggtatgatgaatatcgttatgatcgttgcgatgtttgcgattttctatttcttattaattcgcccgcaacaaaaacgtcaaaaagcagttgctcaaatgcaaagtgagttagcaaaaggtgatgctatcgtaacaatcggtggtttacacggtacaatcgaatcagtagatgagacgaaaattgttattaaatctggtggttcacacttaacgttcgatcgcaatgcgattcgtgaagttgtgaaaaactaatttggaaggccctgcatgaaatatgcagggccttttttagttactttgctttgacatatttacaccgaaaataccaccgagtgtactcgcccccattaatgctaattgataaagtaattgtgagttcgataaagtttgagaaaagcctaaatagttaactagaaaaacgagtatagtgaacgtgagacctgttgtgagacctactagccaaccttttccttgagcctttttgccggcagtaaatccagacataagcatagataaaagagcgagtataaaaatagtaacggttaatgtcccttcgtttatattcgtaaactttaataaaagagccataatcatactagtaatagatgcgagaattagtagtgtaacaataccgaagccaattgcagttgataattttttcgttccatccatttatgcattccccctttttaatacaagcatattttccttttgtctaagttagactagtttcttttttataggggagtctatacgtaaaaaaggagatgtagaaatggaatggatatcaataattggacggacaatgcttttgtatatcatcatcttaattatttttcgtcttatgggtaaacgtgagataggagagctaagtgtattagatttagtcgtatttattatgcttggagaaatggctgtagtggcaattgaaaataccgataaatcactttggcatcaattagttccgatgacttttcttatgtgcatccaaattattttgtcagtcatttccctaaagtatcaacgctttcggcatttaatagaaggtgagccggctattcttgtaaacgcgggaaagattgatgaaaagaagatgagaaagcaacgttataatatagatgatttaatgatgcaattaagggaacaaggagttggagatattcgggatgtagaatatgctattttggaaccgtctgggaagttatctgtctttcaaaaacaaaaaaataaacaagatacattgcagtttacgcttcctcttattattgatggagaaattcaatctagtcatttacaaatgattgaacatacagatgcatggcttattgagaaattaaaaaacttaggttataacgatgtaacacaaattttatactgtagttttcaaaacggaaaattttttgttgatgtaaaagaaaattagagacttattctttgaaagagtaagaatgattagtgtaactaataatcagtggagattaccccactgattaaagtttcaccttatttcaaaaatgaaagtttacgaatgatagggagacgacttaactcttcttttcgaatgagtttgaaagtgaagagaagtacgatataaacaattgttgttaaagtgatttcccataatgtttgtatgccaagggcatgagagaaaataatatatttatgaagataaaaaccgaaggcgcctgcgataccgatggcaagtccgccgaaaatatagtcttttgcgtaaatggtaaatgtaatcttttttaaaacagtagcgtagtgaagaaatgttactgttacaatatttgctgcaatagcgagagcaacccccatcatttgaaattctggcctggatgctagtacaaaaataacgattaatttcacgatggctccaataaatgtattcatcattgcagctcttgctaagtttaaagcttgcaaaacagaggtaagtggactttggaaataatgaaataaaaagcaaggcgcaagaagttgaatgaatgctgttgcgctgtctgatccatacataagagttaaaacaggagaagcgaatacgtataatataacgacagaccatccgccggtaattaatgaaattcgaagtgcttgttgtaaacggtgctccactaatttatgttgtctttttgccattgcttcactaatagaagggacgagcgctgtagagagagcgtatgtaataaaggcgggtagtgatagaagcgggaatgcataaccgtttaatataccgtattgctgggttgcaacagaagcagcgacaccagcgattgctaagctttgcataacgacaataggttcaaaaaaatatgaaacggagccgattaaacgacttcctgtagttggaagggcaatatccatcagagaataaaatgtccctttgctttcctttacagtagtgaaaaatccagagcgtattgataaatgtttttctcgctgaaataacgtgagtaaaaataataacgatgcaacttcaccgagaacagctgataacatagcgccggctgcagcgtattctatgccgtaaggtaaaaataattgaatgcatatagcgataatggtaatgcggacgacttgttctagaacttgcgcataagcgctaggtttcatgttttgtttcccttgaaaataaccacgcaaaacagaagaaacagcaataacaggaacaacgggcaaaatggccattaatggatagtacgttctttcgtcggttaataatgtttttgctaaaataggtgtgaggaacataattccgattgttaaaatgatactaataacggatgtaacagctagtgatacggttaatatttttttaactctttgtttatcgttcacagcttccgcttctgctacaaattttgcgattgcgacaggaagaccaatttgtgtcaatgtaattgctaaaatgaatgtaggaacggccatcatataaagaccaacgccttcttctcccaaaatacgtgccattactatgcggttgataaagccgagtatttttgtaataaagccggctatcattaaaataaatgcgccttttaaaaagctttgtctcgtcatgttcttctcctaccttctcaaaatcaatggaatgatttacaataatttatatgcacgtacgagacaagaatgacaagcatttaagagagtgaaatatgatagtgctcttgaaagtagttattgctgtccattagagcgggaataaaagcgacttttcgtgcgaaataagaaggagatgttatagatgttagatagagaggctttggtagaatcataccgcggacagttacaagtcgttttagaaagtaaagtagaagagtttcaaatgttcggctacgacagagtgacagatgatgacatttggaagtttcttaaagtgaaaaagtggaagaagatagacagcgatgttagattgtatgaattagttaatgacgtattaacagtaagtgctaatgaatatatgacatatttaactgttgaagcatatcaagcgccactttggtcatttgatgaatatgaaaataaataaccgactgcaattggtttgttcttccttttgcagtataatgataggtattgataatcaggaaataattatgtctaagatcatatataaaggaggtagtgaagagagaaaacaaataatgaaagtgcaggtatcgtgaaaacgtaccggcacagctagtgatgagctagcaaaattatagaaaggaagtctactaactagacgtatacacacgtgtaaaagtgaatcgtaagagatttatttaaagtgttagtagcggaaagagggtacatatggcaaagcgtggtacgagaattgccgcctttttcctcatcgttttattaatcggtggagtaattggtgcggcaggaaaagacatagcaaaaggaattagtctaggactagaccttcgcggtggttttgaaattctgtatgaagtaaaaccagccaaaaaaggggacaaaatcgatcgagacgtacttgtaagtacagtaggtgctcttgagaatcgtgtcaatgttctcggtgtaagtgagccgaacattcaaatcgaagggcaagatcgaattcgtgtacagcttgctggtgtacaagatcagcaaaaagcacgtgaaatgttatcaacacaagcgaaattaacattccgtgatgtagatgataatcttcttatggacggaacggatttaaaaggcggcggagcgaagcaaacatttgatgagcaaggccgtgcgagcgtaggtcttacactaaagagcgctgaaaaattccgtgaagtaactgaaaaaatttcaaaaatgccaccaccaacgaatttaatggtaatttggcttgattttgaagaaggaaaagattcgtacaaagcagaatctgcaaaaccgaatccgaagttcttatcagcagcaacagtaaaccaagtatttaaccaagctgaagtatctatcgtaggtggaaacttcacagttgaaagtgcgaaacaactttcatctttattaaatgcaggtgcacttcctgttgatttaaaagaaatgtattcaacatctgttggagcgaagtttggtcaacaagcgttagagcaaacgattttcgctagtgcgattggtatcgctcttattttcttatttatgcttgtattctaccgtttaccaggacttgtagcggttattatgttaggtttatacgttttcgttacattacttgtctttaactggatgcatgcagttcttacgttgccaggtattgcggcgttagtgctcggagtaggtatcgcagttgatgcgaatattattacgtacgagagactgaaagaagagttgaaaattggtaagtccatgatgtcggcattccgcgctggtaaccatcgttcattagcaacaattctagatgcaaacgttacaactcttgcggcagctggtgtgttattcgtttatggtaatagctctgtaaaaggattcgcaacaagtttaatcgtaagtattttagttggttttattacgaacgtattcggtactcgtttcttactaggtttacttgtaaagagccgttactttgataaaaaaccaggatattttggtgtgaaacaaaaggatattattccattaacaaaaggtgtagtacatccgccaacgagatttgatcgtattaacttcgtaaatatcggtcataaattccttatcttctcgattgtagttgtaattgcgggtgcaattatcttaccaattttcaaattgaatcttggtattgactttgcaagtggtacacgtattgacttgcaatcaaaacaagccgttacggtgtctgatgttcataaagattttaaagaactgaacattgatgtgaaggaagaaaatattgtaccgactggagatgacaataaaggtttcgcagttcgtacattaggtgttttatcaaaagatgaaattgcgaaaacaaaaacattcttccacgataaatatggtacagatccaaacataagtacagtttcaccgacaatcggtaaagaaattgcacgaaatgcatttatcgctgtactgattgcttctgcggttatcattttatacgtaagtattcgattccgatttacgtatgcgttatctgcagtacttgcattattacatgacgctttcgttatggttgttatgtttagtattttccaactagaggtagacttaacgtttatcgctgcagtactaacaatcatcggttattctattaatgactcgattgttacatttgatagaaaccgtgaattatacaaacagaaaaaacgagtgcgcgatataaaagatctagaagaaatcgtaaatgcaagtattcgccaaacgcttggtcgctcgattaataccgtattaacagtgttattcccagtaattgcactgcttatcttcggtagtgagtcactacgtaacttctcgtttgcgttacttgttggattaattgtaggtacgtactcttctgttttcgttgcctctcaaatttggttaatgcttgaaaaccgtcgtttgaaaaagggaaaaaacaagaagaaggttgagaaagtagaatctgaaccgcaagtatagaaaagatgatgtctctttatgaggcatctcttttttcgtttgtggatacaataagatagcaactttttaacagaaagaagatggaagaaagtggtggtgttatcgctgtttttgttaaaataaaaagataggttaagaaaagaagggattttaattatggaaaaagatgaacgttttaaacaggccgagtttggtgccattgtcgggatcgttggtaatattatattagcgattgtaaaggcggtaattggttatattgggaacagtaaagcgctattagcggatgccgtgcattctgcatcagatgtaattggttcgctagctgtactttttggattgcgagcggcaaagcagccacctgatgaagatcatccgtatggtcatggtaaagcggaatcgatttcagcgattattgttgcggtattattatttattgtgggacttgaaatcgcgatttcatctataaaagctttttcgcaagaactagaaccgccgaaaggaattacgatatttgctgttgttctttcaatcgtcgtgaaagaaggaatgtttcaatataaattccgattagggaaaagggtaaatagtgatgcaattattgcaaatgcatatgagcaccgttcggatgtgttttcttcaattgcagctttaatcggtatttgtgcagctatactcggtggtaagcttggtatagactggcttgtatatgctgatccgattgcaggattagttgtttcgcttcttgttgtaaaaatggcatggagcattggagcggaagcaattcatgcaacgcttgaccatgttcttcatgaggaggatgttattccgcttagagaggccgttcttcaagtagatggtgtgaaaaaaattggttctttatatgcacgggagcatggtcattatgttattgtcgatattaaagtgtctgtagatccatacattaccgtagaagaaggacaccgtattggaaaacatgtgaaagaaatacttatgaaacaagataatgtacaaaatgtattcgtacatataaatccgtattctccaaattaaacatcattaacattttagtatatagatattgcatcgtagtttgcattatattgtcaccccttaatctgtcttgtataatgaacaggttaaggggtgatttcgtgttacaaccgaagacgcgttggaaagaaaaagaatataatgacgagcgagtgagtgaattagcaagtaaattacagttatcgccacttgtcgtttcattattcctcggtagaggactagatacagaagataagattttagattttttaaatacagaaaatcaagaatttcatgatccatttttattagaaggaatggatagaacggtagaacgtgtaaataaggcgattcaaaatggagagcaaatattaatatttggtgattacgatgcggacggagtaagtagtacgacggttttatatcttgctcttcaagaattaggtgcagaagtagaattttacattccaaatcgttttacagaagggtatggaccgaacgaagaagcatttcgttgggcgcatagtgcaggtttctcactgattattactgtcgacactggcatcgcagcagtacatgaagcgaatgtagcgaaagagcttggaatagatctaattattacagatcaccatgagccaccgccagaattgccagaagcgcttgcgattatacatccgaaattagaaggtggcgtatatccgtttcactatttagctggtgtaggtgttgcgtttaaagttgcgcatgcactattaggccgtgtaccagaacatttattagagattgcagtaatcggtacagtagccgatttagtatcacttcatggtgaaaataggttgctagtgaaacgcggtttaaaacatatgcgtatgacgagaaatattggtttgaaggcattgtttaaagttgctaacgtttcgcaaagtgaaattacagaagagagtattggcttctcaattgcacctcgtattaatgcggttgggcgtttagaagatgctgcgccggctgtacaccttttattatcagatgatccagaggaagcgaaagagttggccgaagaaattgatgagctgaacaaactgcgaaaagatattgtaaagcaaattacagaagaagctatcgctgaagttgaaaataaattcccgccagaagaaaacaaagtattagtacttgcaaaagaaggctggaacccaggggtaattggaattgttgcttctaaattagttgaacgtttttatcgtccgacgattgtattaagcatcgatcctataaaagaaacagcaaaaggctcagcacgtagtattgcaggatttgatttgtttgcaaacttatcagattgtagagagttattgccacacttcggagggcatccgatggcagcgggaatgacgctacatatgaatgatgtagatgaattacgtcgccgattaaatgaacaagcagatgcgattttaacagaagaagattttattccaattacagcagttgatgttttttgcaaagtagaggatgtaacgctagcggcaattgaagatatgcaaaaactagccccgtttggtattggaaatccgaaaccacgtattgcagtaaaagatgcagagttagaaagcattcgcgcaatcggatcagatggttctcatttaaaaatggctcttcgtgatggacaagcaacactggatacaattggatttggttttggtgcatatgctaaagaaatctctccagttgcaaaagtatctgtaataggagaagcatccatcaatgaatggaataattttaagaagccacaactaatggtacaagatattgctgtagaggcgtggcaattatttgattggcgtagtatgcgtaatgcagaagcaaatttagcagaacttccgaaagaaaaaataacaatggtgtatttttctgaagaggtattgaataaattttctttagagagctataaagaaaagctcatgcatgcttcagaagtaacgcatttagatgatcaatatatcgtgttacttgatttaccaaaaggaaccgatgaattacgtgagttatttaaggcaggattcccagcgcgaatttatacgctattttatcaagagaataaccacttatttagtacagttcctacgagagaacactttaaatggtattattctttcttaaaccaaaaaacaccattttctttaagacaatatggagaacaactatgtcgtcataaaggttggtcaaaagatacagtaaattttatgacacaggtgttttttgagttagaatttgttacaataaaagatggcgtcatttttatggcagacaaaaaacaaaagcgtgatttaattgaatcgaacacatatcgtgagaaaatgaaccacttacaattagaaaaagaattggtttatagcacatatcagcaactatatacatggtttgaaacgattcgtaatcataaagaagtagaacagttagggtaaaggatttgtatttacaaaccttttagatctgaggaggattcagaaatatggatttcaagcaacatatcgcaattgtaccggattatccgaaagaaggtattgtgtttaaagacattacacctttaatgaatgacggtaaagcatacaaagcagcaacagatgcaatcgttgaatacgcaaaagaaagagatatcgatgttgtagtaggaccagaagctcgtggtttcattatcggttgcccagtttcttatgcgttagaagtaggatttgcgccagttcgtaaattaggaaaattaccacgtgaagtaattacagttgactacggtaaagaatatggtaaagatgttttaacaatccataaagatgcaattaagccaggtcaacgcgtattaattacagatgacctattagctacaggtggaactatcgaagcgacaattaagctagttgaagaacttggcggagttgtagcagggattgcattcttagtagagcttacttacttagatggtcgtaaaatgttagatggttacgatgtattagtattagaaaaatactaatcactatataggtaaaactacggtgataaaaagtacccgtgaatctcttggagaggagcgggtacttttgtataattgaacaaaaaatcatggtgaaatgtcagtaaaatcttttccttttcacaattcacaatcattgggttataatgatagaatataatttattctattaaataaagataaagtcaattttcaataaaaggtgattcgatggcaaatgagcaggtactaacagctgaacaggtactcgagaaagcaagtcaatatttagtggatgaagatattgagctagtagcacgtgcctatgaatatgcacgcgatgcgcatagcgaacaatacagaaaatcgggtgaaccgtatattattcatccaattcaagttgcaggtattttagttgatttacacatggatccagctacggtatcagcaggtttcttacatgatgtagtggaagatacagagattacgttagaagatattgaacgggaatttaacaaagaaattgctatgcttgttgatggtgttacgaagcttgggaagatcaaatataaatctcacgaacaacaacaagcagaaaaccatcgcaaaatgtttattgcaatggctcaagatattcgagttattttaattaaactagctgatcgtcttcataacatgcgtacattgaaacatttgcctcaagagaagcagcgtcgcatagcgaatgaaacgctagaaatctttgcacctttagcacatagactcggaattagtactattaaatgggagctagaggatacgtcacttcgctatttaaatccacaacaatattatcgtattgtaaatttaatgaagcgtaaacgtgcagaacgtgaagaatacttagacgaagtaatgactggtattcgtgagaaattaaaagaagttgcaattcaacctgagatctctggaagaccgaaacatatttacagtatttatcgtaaaatggcactgcaaaataaacagttcaatgaaatttacgatttattagctgtacgtgtcgttgtaaatagtattaaagattgttatgcagtgcttggaattattcatacgtgctggaagccgatgccaggtcgttttaaagattatattgcaatgccaaaagcaaatctatatcaatctcttcatacgactgtaattggaccgaaaggtgatccacttgaagtgcaaattcgtacgaaagaaatgcacgaaattgcagaattcgggatcgcggcacactgggcatacaaagaaggaaaaacagcagaaacaacaggtacattagagaagaaactcacgtggttccgtcaaatattagaatggcaaaatgaagcttctaatgcagaagaatttatggagtcattaaaaattgatttattctctgacatggtattcgtctttacaccgaaaggcgatgtaatggaattaccacttggatcggttccaattgatttcgcgtatcgtgtccattcggaaattgggaataaaacaattggtgcaaaagtaaacgggaaaatggtgacgctggattataaattaaaaaccggcgatatcattgaaattttaacgtcgaaacattcatatggcccaagtcaagattgggtaaaacttgctcaaacatctcatgcgaaaaataaaattcgtcaattctttaagaaacaacgtagagacgaaaatattgaaaaaggccgtgaacttgttgaaaaggaagtacgtggtctagagtatgagatgaaagaagtattagcgcctgataacttaaaacgcgtcgcggagaaatttaactttgcaaatgaagaagatatgtttgcagcagttggatatagcggaattacagcttcgcaaattgttacgcgactaacggacaagttccgcaagcaacgcgaagaagaagaaattgttgaagtcaaagaagttcgtaaaccgatgaaaattcgaaaatgggattctggtgtaaaggtaagcggtgctgataatttattaatccgtttatcgaaatgctgtaacccagttccgggtgatgatatcgttgggtatattacgaaaggccgaggtgtatcgattcatcgccgtgattgtgtaaatgttcatacagaagaagcgatagaacgtttattagaagttgagtgggaaggtagccctgaaaaagaaatagagtataacgttgatattgaaatttcaggttacgatcgccgcggtttattaaatgaagtactgcaagctgttacagagacgaaaacatacatttcagctgtttctggtagaagtgaccgtaataagatggcaacaattaatatgtcaatctcgattcgtaacttacaacacttgaaaaaagtagtagaacgcattaaacgcgttccagaaatttatgcagtacgacgcatgatgcattaatagggagtgtagaaagatgagagttgttttacaacgatcaaagaaagcgtctgtcacagtagacggtgagatcgtaggacaaattccgttcggtttaacattactagttggcattacgcacgaagatacagaaaaagatgcaacttacattgcggaaaaaattgcaaacttacgtatttttgaagatgagagcggaaagatgaatcattctgtacttgatgtagaaggacaagttctatctatttcgcaattcacattatacggagattgccgcaagggaagacgtccaaactttatggatgctgcgaaacctgattatgcagagcgtttatacgatttctttaatgaagaagttcgtaaacaaggattacatgtggaaacagggaagttcggagcaatgatggatgtttctttaatcaatgatggtccggtgaccttaattgtagaaagtaaatagtgttgataaaaaagagagggttatataatcctctcttttttatacattgttgtatgttttgttcatttatttggaattaatagcagtttcggttatgtataactctcccatcaatatggaacaataaaaagtaaaacatccatattgaatgtgagggatatacgtatgcgtatgaatgaaaaagggcattctgttacaaatggtgcaaatcaactatttaacgtgaattttcatgattttatttcaaaagagcaaaacaatacttcaatggagcttgcttccgagtttgggatttctcttcaagatgtaaagcgtttaaagaagcagattgaacgttcttagagcacttgacaatcctacttaacaaacgtatagtaattttatatttacatatgaatataaccgttgatagagaagagtaaatgagacacacatggaaagagaaggaatgtcttaggctgaaaacatttctgcatgatgactgattgaatgacactctagaggtttcaacttgaacggcatatacgcttagtagggatgaacgcacatttaagcgttattaaaaaagtggaagcatacgtgcttcaattagggtggcaccacgggtataatactctcgtccctactgtttaaacagtagaggcgggagtttttttatttttattaagattaaaacaatttgaggaggaactgaatatgtctattcaaatcccacgcggaacgcaagatattcttccaggcactgttgagttatggcagtatatcgaagggcaagcacgcgaaatttgccgtcgttacaattataaagaaattcgtacaccaatttttgagcacactgagctatttttacgcggtgttggtgatacgacagatatcgtacaaaaagaaatgtactcattccaagatcgtggagagcgcagcttaacattacgtccagaaggtactgcacctgttgtacgttcttatgttgaaaataaaatgtttggtgatgcaacacaaccaacgaaattatactatatcggtcaaatgttccgttatgaaagaccacaagcaggtcgctatcgtcaattcgtacaattcggtatcgaagcaatcggcagtaatgaccctgcaattgatgcagaagtaattgcacttgctgttgaattttaccgcggcatgggcttaaaaaatattaaagttgtattaaacagtttaggtgacgcagcgagccgtcaagcacaccgtgatgcattaatcgcacactttgagccacgtatcggcgaattctgttctgactgtcaatctcgcttagaaaagaatccacttcgaattttagactgtaagaaggaccgtaaccatgaattaatgggaacagcaccatctattacagaatacttaaacgaagattcagcaatatactacgacaaagttcaagaactattaacgatgatgaatgttccgtttgaaaaagatccgaacttagtgcgtggtttagactactaccaacacactgtttttgaaattatgagtgaggcagaaggtttcggtgcgatcactacattaagcggtggtggccgttataacggacttgtacaagaaatcggtggaccagaaatgccaggtatcggttttgcaatgagtattgaacgtttaattatggcgctaaaagctgaaaacattgaattaccacttgaacatagcattgattgttacgttgtggcgcttggcgaaaaagcgaaagaccatgctgcaaaagttgcgttcgatcttcgtaaagctggattgtcagttgaaaaagattatttagatcgcaaaatgaaagcacaatttaaatcagcagatcgtctaaaggcgaaatttgtagctgtattaggagaagatgagctagataaaggcatcattaacttaaaagatatggcaacaggtgaacaagaagaagtagcgttagatgtatttgcttcatacgtagcagagaaattaatatagggggaacttacagtggctgaaagaacacatgcatgtggaaaagtaacagtagaagctgttggacaaacagttcaattaaaaggttgggtacaaaaacgccgtgacttaggtggattaatctttatcgacttacgtgaccgtacaggtatcgtgcaagttgtatttaacccagaaacatcaaaagaagcgttagaagtagcagaaacaattcgtagcgaatacgtattacacgtagaaggtacagttgttgaacgtggtgaaggcgcaattaatgacaatatggcaactggtcgtattgaagtacaagcaacgaaagtaaatgtactaaatgcagcgaaaacaacgccaatcatcattgctgatgatacagatgcatcagaagatgtgcgtttaaaatatcgttatttagacttacgtcgtccagtaatgtttaacacattcaaaatgcgtcatgacgtaacgaaaacaattcgtaacttcttagacacagaagagttcttagaagtagaaacaccaattttaacgaaaagcacgccagaaggagctcgtgactatttagtgccaagtcgtgtacatgatggtgaattctatgcattaccacagtcaccacagttatttaaacagcttcttatggtcggcggatttgagcgttactatcaagtagcacgttgtttccgtgatgaagatttacgtgcggatcgtcaaccggaattcacgcaaatcgatatcgaagcttcattcttaacacaagatgaaattttagatatgatggagcgtatgatgacgaaagttatgaaggatgcaaaaggtgtagaagttagtgcaccattccctcgtatgaaatatgctgatgcaatggctcgctacggttctgataagccagatacacgctttgaaatggaactaacagacttatctgagtttgcagcaggttgtggctttaaagtgtttacaagtgctgtagaaagcggcggacaagtaaaagcaatcaatgcaaaaggtgctgcaagtaaatattctcgtaaagacatcgatgcattaactgaattcgtgaaagtatacggtgcaaaaggtttagcttggcttaaagttgaagaagacggtttaaaaggaccgattgcaaaattcttcggtgaagaagatgcaaatgtgttaatgagcacattagaggctactgctggcgacttattactattcgtagcagataagaagagcgttgttgcagatagcttaggcgcacttcgtttacgtctaggtaaagagcttgagttaattgatgaaagtaaatttaacttcctatgggtaactgattggccacttcttgagtacgatgaagatgcagatcgttacttcgcagctcaccacccattcacaatgccattccgtgaagacgttgagttactagaaacagcaccagaaaaagcacgtgcacaagcatatgaccttgtattaaacggttatgagcttggtggtggctcacttcgtatttacgagcgtgacgtacaagaaaaaatgtttaaagcacttggattctcacaagaagaagcgcaagagcaattcggattcttattagaagcattcgaatacggtacaccaccacacggcggtattgcattaggtttagatcgtcttgttatgctgcttgcaggccgtacgaaccttcgtgatacaattgcattcccgaaaacagcaagcgcaagctgcttattaacagaagctccaagcccagttgcagaagcacagcttgaagagttaaacttaaaattaagcttaaaagaagagaagtaagaatagggtctagatggttatactataaccgtctagactttttttgagaggttgtttaaaaagtccggtttagataactgtcgcatctcatcgttgcttcgccagtccggtgctcgagtagtatttttctacactgcgctcctcctggcttcagcgcctcgatctgctcggttctctgaatcctcttttttaaacgtgtattgaaaggaagtttaaaaagtccggttcagataactgtcgcatctcatcgttgcttcgccagtccggtgctcgagtagtatttttctacactgcgctcctcctggcttcagcgcctcgatctgctcggttctctgaatcctcttttttaaacgtgtattgaaaggaagtttaaaaagtccggttcagataactgtcgcatctcatcgttgcttcgccagtccggtgctcgagtagtatttttctacactgcgctcctcctggcttcagcgcctcgatctgctcggttctctgaatcctcttttttaaacgtgtatttaggaagaaatgaaattctggtctatgttttcattttcgaaatatgtatttttaggaattctataactttttctatacaaatagtcggaaaaacgctagaatacatggtagaccatttttgtaataggagtgtagagctgaatgttacatcaattttcacgtaatgaattagccttcggtaaagaaggacttgaaatattaaaaaatagtacagtcggtattttaggaattggcggcgtaggttcattttcagctgaagcgttagcgcgttctggagtaggacgtctcgtattagttgataaagacgttgtagatattacaaacgtaaaccgtcaaattcacgctttagtatctactgtaggacgttcaaaagtagaattaatgaaagagcgtattgcagacattaatccggaatgtgaagtaattggactagaaatgttttatacagatgaaacatatgaggagttctttaaacacggtttagatttcgtagtggatgcatctgatacgattacgttcaaaatccatttaattaaacaatgtttacgtcgtaaaattaaaattatctcatgtatgggtgcagcaaataaaatggacccaactcgtttccgtattgcggacatttctaaaacacacacagatccgattgcgaaagtcattcgtacgaagcttcgtaaagagggtattaaaaaaggtgtaaaagttgtcttctctgacgaaaacccaatcgtaattcgtgaagaagtacgtaaagaaatcgtaccagacgaaaatgcaaaaattcgtaaagcgaaattaccgccttcatcaaatgcattcgtaccatctgtggcaggcttaattatggcaagtcacgttgtacgtgaacgtattaaaaatgtagaagtgaaacgtgtagggcaagaataaaagaaaagcatatatccattttggatatatgcttttttatatgtattaaagaaatatggatatttgcattactactagttcaaatgtaagtaaggttagtaagtaaaaatcatatttatctgatttataggcggatgtcttttttagactgttaatggtgaaaagagctaaagttaggacgagaaggccaagagttattttgaagattattaatgaaatagcaaccatccccctttaaaggtatatgtttataataatattttagtaaaaaatatctaatccgttttaggagtttccttgtatgacaaggaggaatgttattgtcaatctttgtcgttaaatcgatatcctttattgaatcgttgatatattgcaagttgtgatagatatattcgaaaaatcgttgatatattgcaagttacgatagatatattcgaaaaatcgttgatatattgcaagttacgatagatatattcgaaaaatcgttaatataatttcatttaccgacatgtatatatatgatttaccgaaaacaaacaaggatgtcactcagttaaaaaagtgacatccctgtttttaattctcagcagaataaataatatctaaattcccgttttgatcggttttgaaaatcggggcaatttgctcttcttgctcttcgactgaaacaagttttcgagcacgatccataattcgaacaagcatcgcgtaatcttcttcgattgcttgttgtttttttgtgagtaccgctaatttcgtttcaagttcatgattcgttttttgcagagaagtgagctgagcttgtaatacatcattttcagtttgcaactttgcgagtgaagggttattatgctccaagttttgcaaaaatgagatgacattttgcatcgtaagttcttgtttacttggcgtaatatcttcagaaaactcagcatcgattacgagttgtttcgttttcgtgaactgatttttttctattttagcttcagagcgctttaattctttacgttgtttcttcgcaagctgcacagcatcttcgtaattcggtcttacttcagcattccatctaaagccgcaagctgctgaagtccggttcaacgtatcgccgacttcatcaaatgcttttatttgtgtacttccgctgcgaatatgtcgtaaaacagtttctgctaaaaggagatcatcttcttttgtccatgcatcttgacgtgttttcataagcgaagcctccataatggtgacgttttcgtttatgttaccctttatttttcgttttattcgaagtttgtaatctttcataaacagtagaaagtgcttgctcaaatttccctgtcgttttcggtttataatattgcttgttttttattttatcaggtaagtattgttgccttacccagccgtttggatggtcgtgtggatataaatatccaatgcctcttccaagtgattctgcgcctttgtaatgactatcttttaaatggcttggaatgtcacctgtttgaccgttgcgtaaatcgtgtaatgcagcatcaagtgctttataagctgaatttgattttggtgataagcatagctcgataacggcatttgcaagtgggatgcgtgcttctgggaatccaactcgttcagctgattcaattgcagctagtgtacgtggtccagcttgtgggctagcaagtccaatatcttcataagccataataagaaggcgtctgccaatactttgtaaatcacctgcttcaataaggcgtgctaaataatggagcgctgcatttacatcacttccgcgcactgatttttgaaatgctgataatacgtcataatgagcatcgccgcctttgtcgtgaacgaagctcttcttttgtaagcattcttctgcaatctcgagtgtgatttcagccgcttgatcgtctgtagtaaagctagataatacagcaagctcaagtgcgttataagcggaacgcatatcaccaccagaggcgtttgcaaagtgatgtagtgcttcatctgttaccgttacagcatattctccaaggcctttttctttatcttctaaagctctttttaacccaattaaaatatcatcttctgttagtgcgtgtaattcgaaaatttgacacctgcttcgaatagcggagtttattgcatggaatggattacttgtcgttgcaccaattaaagtaagaagtccgctttctaagtgaggtaatagaaagtcttgctttgctttatctagacggtgaacttcatctaaaattaaaacgaggtgtcgatgcatcttcgcttcttgtacgacaacttccatatcttttttattgtgagtaacagcattcaatagacgaaacggggtaccggtacttccagcaattgcactggcaatggatgtttttcctgtacctggaggaccgtataaaatcatagattgaaaatgattggcttggaccattcgccataaaatctttccttcaccaactaaatgttgttgcccaataatttcttgaatatttgtagggcgcattcgatgtgcgagtggttgtttcatttggaccgtctcccttaatatataatctcgttctatcgtatcatttttttctacgaaatttgaaataggatgctgttttatgggaaaaataaatgataatattttcatttttctttcaattgtaataattcccgagtttttcaatgcgattttatgttatcattttgatacacaagttgaaatttcttataatactatattatgctataatttcataggattttaaattgtgttctttttataaataagatataaccaatagaagtgaaaatttgaaaagaggtgcaaaatagatgaaaatttcaacgaaaggccgctatggcttaacaattatgattgatcttgcaaaaaagtttggtgaaggtccgatttcattaaaatcaattgcgcaggcacatgacttatcggaacattacttagagcaattaatttcaccacttcgtaacgcgcgtctagtaaagagtacgcggggagcatatgggggatatgtactatcagatcagccggctaacattacagctggagatgtaatccgtgtattagagggtccgattagtgttgtagaaatgatagaagaagaagaaccagcacaacgccaattatggatgcgtgttcgtgatgcggtgcaagaagtgttagatagtacaacgttagaagatttagtacgttatgaggaagaaaatcacgggggctatatgttttacatttaattccttgtgaaacgatttggaaagaaggagatttaatggaacgcatttacttagatcatgctgcgacatctccgactcacccagaagtggtcgaaaagatgattccatatatgacagaaatattcgggaacccgtctagtattcacttttatggacgtcaaactcgtcacacagtagatgaggcgagaagagtgtgtgcacgcagcattcatgcgaatccgaatgaaattatatttacgagcggtggtacagaagctgataatttagcgcttatcggtgtagcacgtgcgaaccgtcataaaggtaaccacattataacgacgcaaattgaacatcatgcgattttgcatacgtgcgaattgttagagcgtgaagggtttgaagtgacatatttacctgtcgatgaaacagggcgcattcaagtttctgacatacaaaaggcattaacagaagagacgattcttgtatctgttatgtttgggaataatgaagtagggacgatgcaaccgattgtggaaataggaaagctgttaaaagagcatcaagcgtatttccatacagatgcggtacaagcttacggtttagtagaaattaatgtgaaagagtttggtattgatttattatcaatttcagctcataaaattaacgggccaaaaggtgtaggtttcttatacgctggtacaaatgtgaaatttgaaccgttattaataggcggagagcaagaaagaaaacgccgtgctggtacggaaaatgtgcctagtattgctgggcttcagcatgcaattcttatagctgaaaaaactcgtgagcaaaaaaatgcccaatatgaagagtttaaagatataatggtatctgtcttcaaaaatgaaggcattactttcgaggtaaacggaaacttagaacatcgcttaccgcatgtacttaatgtaagttttacaggaatgaacattgaaccgtttcttgtgaacttagacttagctggtattgcagtatcaagtggttctgcttgtacagctggttcgattgatccatcacatgtattagtagcgatgtttggaaaagactccgatcaaatacgttcatccgtacgctttagttttggacttggaaatacgaaagagcaaattgaaaaagcggcgtacgaaacagtgaaaatcgtgaagcgattaacacaaaattagtatgggaggtgacatgatgaacaaactacctcacgaaacacgcgttgtcatcggaatgtccggtggcgtcgattcatctgtagcagcacttttattaaaagagcaaggttatgatgtaatcggaatttttatgaaaaactgggatgatacagatgagaatggtgtctgcacagcaacagaagattacaatgatgtaattgaagtgtgtaaccaaattggtattccgtattatgcagtaaactttgaaaaacaatactgggataaagtatttacgtacttcttagatgagtaccgagctggtcgcacaccaaacccagatgtaatgtgtaataaagaaattaaatttaaagcatttttagagcatgcaattgcgcttggtgcggattatgtggcaacaggccattatgcacgcgttgcttatatggacggcgaatataaaatgcttcgcggtgttgatgacaataaagatcaaacatatttcttaaatcaattaagccaagagcaattatcaaaaacaatgttcccgttaggtgaattaaagaaaccgcaaattcgtgaaatggcgaaagaagctggcttagcgacagcggcgaaaaaagatagtacaggtatttgcttcattggtgagcgtaactttaaagatttcttaagtaactacttaccggcacaaccaggtgtaatgcaaacattatctggtgaagtgaaagggaagcatgacggtttaatgtattatacaattggacaacgtcatggccttggaattggtggtaatggtgacccatggtttgctgttgggaaaaatctaaaagaaaacattttatatgttgatcaaggattccataacgaacttctatatggtgatgaagttattgctacgaatgtaggatgggtaagtaacaaagaaaaagaaacagaatttaagtgcacggcgaaattccgttatcgtcaagaagacaataaagtaacggttcaaatcgttgatgaaaatacagttcgtattctttgtgatgagccaattcgtgcaattacaccaggacaagcagtcgttttctatgatggagatgagtgcttaggcggtgctacaattgatgaagtataccgtagtggtaagaaattggattatttaggataaatgagaagcctctgccgattagcggttagaggtttcttttacataaagcgaattttcgttcgcttggaaaatacattctttgttataatttgttgtagaggtgaaggacatgtcaaacaaacttgaaacaggtattcaatatatgcaagaaggaaactgggaagaagcagctaaaaattttacagaagcaatcgaagaaaatccgaaagatgcgcttgggtacattaattttgcaaatttattagacgtattaggtgatagcgagcgagcgattttattttataaacgtgcactagagttagatgataaatctgcagcagcctattatggtttaggaaatgtatattatggccaagagcaatttactgaagcgaaagctgtatttgaacaagcaatgcaagctggattacaatcagctgatgtaacatttatgttaggtatcacacatgtacagcttggaaatgatcgtcttgcactaccattcttacaaagagcaacagaattagatgaaaacgatgtagaagctgtattccagtgcggactttgcttcgcgcgattagaacacgttcaagaggcgaaaccttattttgaaaaggtattagaaatggatgaggagcatgcagatgcgtattacaatttaggtgttgcgtacgtatttgaggaaaataatgagaaggctctcgctttatttaagaaagcaactgaaattcagccagatcactttttagcgggtaatggcgttcgtttattagagcaagaagctgaataagataaaaatatagtttaatgggtagttatccctcatctaaaaaggtgggggatgtactgctcattaaagtgaaaataccggaaaggagaggaaaaatgggaaatcaacatgcaatggatttgtttgaggaagagaaaaagtttataaaagcgcaagttcttcataccattttccacaacgaagaaaacctctattccgttgtcagtatgaaagtcattgaaacgaatgaaacgtatgacgaaaagaaagtaatgataaacggtcattttccccgcatgcatgaagatgaagtgtttacattgacaggtcattttaaggaccatccaaagtatggaaaacaatatatggttgaaacatttaaaaaagaattgccgcaaacaaaagcaggtatggtgcaatatttagcgagtgatttatttaaagggataggaaagcgtacagctgaaaaaattgtggaccatctcggagaacatgctatttctaaaattatggatgaccctgaggcattaaatggtgttgttaataaacaaaaggctcaggaaatatatgagacaattgttgaacatcaagggctagagaaagtaatgagctttttaaatggctacggttttggaacgaaactttctattaagatttaccagcaatataaagagatgacattagaagtgattcgtaataatccgtatcaacttatcgaagaagtggacgggattggttttggaagagcggatgatatagggcgtgcgttagggatatcgggtaatcatgacgaccgtgtacgcgcaggatgtttttacacattagagaatgtctcattacaacttggtcacgtttatatgaggaaagatcaacttgtaagagaaacgatgtcacttttaaacaatcaagaaggaagagtgactgaggaagatattataggttgtattgaaacgatgcaaagtgaagggaaagtcatcatagaagaagaacgagtgtatttagcaacgttattctactctgagaaaggtgttgtaaagtctattcgcaggcttatgaatcaagaagaaacaccttcatttccagaagcagaagtgttaaaaacgttaggtgaaattgaagaacaactgaacgtacaatatgcaccgtttcagcaagaagcaattcaaacggcacttcataaaccgatgatgttattgacaggtggaccaggaacagggaaaacaacagttattaaagggattgttgaaatgtatgcatcactacacgggttatcgttaaatccgaatgaatacagtgatgataatccatttccaatactattaacagctccaacaggaagagcagcgaagcggatgagtgaatcgacaggacttccagcttgcacaattcaccgtttacttggttggacgccagaaggatctttccagcgtaatgaaacggatcctgtccaaggtaagctccttattatcgatgaattttcaatggttgatatttggcttgcaaatcagctatttaagtcgttgccgacgaacattcaagttatcgttgtaggtgatgaagatcagttgccatctgtaggacctggacaagtattaaaagatttattaaatgcaggcgcagttccgacagtgaagcttactgaaatttatcgtcaagcggaaggctcatcagtgattcaacttgcccatgcgataaaaaatggaactctaccaccagatttagcacaaaatcaaaaagatcgttcatttatcggctgtacaggagctcaaattgttgaggttgtgaaaaaagtttgtgaaaatgctaaaacaaaaggctttagcgcaagagatgtacaagtattagcacctatgtaccgtgggcctgctggtattaatgtattaaacgaagcgctgcaacaagtatttaatccgaagagggaaaagagtaaagaaattgcttacggtgatgttgtgtaccgaagaggcgataaagtactgcaactcgtgaatcagccggagagccaagtgtttaatggtgatattggggaaattgtttcggtgttttatgcgaaagaaaacgttgagcaacaagatatgattatcgtttcatttgacggaattgaggtaacgtatacgaagcccgatttaaatcaaattacgcatgcatattgttgttccattcataaatcacaaggtagtgaatttccgattgttattatgccaatcgtgaaaagttacaaccgtatgttacgtcgtaatttaatttacacgggcattacaagaagtaagaagttccttattatttgcggagaggaagcagctttccaatctggtgtaaatcgccttgatgatgcaatgcgtcaaacaaccttagctagtcgcttgcaagaatcacaaggagaagtacagatggtcacagttaatggcgaggaaatggacgtggaaaacatttcaccgtatgatttcatgtaacaaggtgaaattatatagtgaaactttcaaacgcatagcgttgaaaggctccagtaaaatgtataaatgaatgcagtttggacataatggcgaatagaatctgggagactgtaaggagatgaaagccatatgtttatttgtccaaattgcaaagggaaagacattggaaaaataggtgtcaaccaattttattgctggaattgttatatcgaattatcggtttcaaaggggaaaatccatacgcatcaagttgaggaagatggttcactaagctctcttgatgatttatttgatgagaatgaaagaacgatcggataacgaaaagggggatttactttgaatctacgcaattcattaatcgcattaggtgttggagctgcagcatatcaatatgctcgtaagcaagatgtattttcaaaacgcaatatgaaaaaagcacgtaagatgattaagtcttacttataatcatttcgataaagtgaaaaactcccttgtagacaagggagtttttttatgcacccatatgtaaataaaaaagtccgatctctgagaaaagataagatagaccgtagcagccaacgccaagtattccatactgccataattgcttcgctttttctttacgtgaggaatgaataaagaaccccttccaaataccgaacccgatacaaatccattcaagaatcataaaaagtgctgataatccaagcataaacaaaaccataattagccctcctgattatattaattcatgctgtattctcaggggtggttgtccttgttatgttatttatatgtacgtctttaaaaaacagtatggtccgtatgaaaagattttaaaagtttcgcacataacctaccccatttattttcaaaataaaggtggaggaggtttttcatgtgaagaatcttaaaatcatttggatatatcgtttaggattattgttacttgtttttctttgtctgctcgtctttttaaaaattaagccgctatgggcaccgattatttttgtatttaaagtagcaatcacgccgtttcttatcgcgtgttttattgcgtatttattgcaccctttaattgaaaaaattcataaggaagggatgccccgtacacttgccattttgctcatttatatccttttctttggcggaattggttatgggatttataaaggaacaccagtcgttattaaacagttacaagagattaatgaacaatttccgcagtttacaaaaatgtacgattcgtggatggatggcgttacagaacaaacggcgaatttcccttcgttcattcatgaaaaggtgaaacaactttttgtgggtgtggaaacgaagattcaagcgcttttaaataaagtgatgagtacagctcgtggtgtactcgattcattgctcattattttcttaataccgttcattgtattttacatattaaaagattatggtgagttttatcatatcttttggaaactagtcccaagtaaatggcgaggtacggggcaaatgcttgcgaaagaaattgataaatcacttggaagttatattcgaggacagttatttgtttgtttagtattagggggagtatcagctctttctttttggtttatcggtatgaaatatccattattgcttggcattattattggggtaacggatataatcccgtacttcggtcctattttaggagcaatcccgacgttaatgattgcagcaacagtatcaacgagtttacttattaaggcggggatcacaattgcgattttgcaatttgtggagagtaacattttatcgccttacatcgttggtaagtcacttcgtatgcatcccgttattattatgcttgccttactagttgggggagaggtagctgggattgtaggattgctaatatcggttccgattttagcagttattcgcactgtcattgttcatgtgagaccgctcttgaaaaaagaagatgtgtaagtatagaagccctctatgtaagaaatagagggctaatcatatatttatttagaaagctgctcgtgtatcttttgaacgagggagctcacatcatttgtttgaatatgttttatttttttccattcgttatcatacataaatacaatttgattgttgaaaagacgcttttgttcttttagattagaaatttttgcgaaagagtactcttcaaatattggattcttacttacatctggcccataaaagaatagccttttgttcgttaaaactagcattcctggccttgcgacggaacgataaataaatatgtctaatgaacatgctgcgtaaaataatatcgtttcgtcagtcgctaatatgtttttagctttgctaagtaaggttgtcattgtgatcgctcctttattttattaacaataatttaattataacaaaaaagtaatatttagaaatttttataaattattcttataaggagattccgatttattaataaatgcatactatatgaaaaggctgttaagaatgaatagtagaatacttatgattaataagtaattaatccaatataaatgattatctacattgacaaacttaagagaattctattatatttagtcatataatacattaaatcaatgacggaacaagtacgttacagtccatttatagagagaagcttccatatggctgaaagaagctttaaatgaagggtaacagaaagctaatcctgagagcagctaatcactgccgtcttgccacgttacggcaccatgaggtgatgaattgattgttattgtaatcaattcataattagggtggtatcgcgagttaactctcgtcccttttatagggacgggagttttttatatttaaggaggaaaatacaatgaaacaactaacaggcgcacaaattcgtcaaatgtttttagactttttccaagaaaaaggacatgcagtagaacctagtgcatcactagttccgcatgaagatccatctcttctatggattaatagtggtgtagctacattaaaaaaatattttgatggacgtgtaatcccacaaaatccacgtattacaaatgctcaaaaatcaattcgtacaaacgatattgaaaacgtagggaaaacagctcgtcaccatacattctttgaaatgttaggaaatttctcaattggtgattacttcaaagaagaagcaattacatgggcttgggaattcttaacgagcgacaaatggatcggattcgataaagaattactatcagttacaatccatccagaagatgaagaagcattcacaatttggaatgagaaaatgggcgttccaaaagagcgtattattcgcttagaagaaaacttctgggatatcggtgaaggaccaagtggaccgaatacagagattttctatgaccgcggagaagcttacggtaatgactttagtgacccagaattatatccaggcggagaaaacgagcgttacttagaagtatggaaccttgtattctctcaatttaaccataatccagacggttcatatacaccacttcctaagaaaaacattgatacagggatgggtctagagcgtatgacatctatcgttcaagatgtgcctacaaacttcgatacagacctattcatgccgatgattgatgcaacagaaacaatttctggtgaaaaatatcgtaatggcgatttagaaaaagatatggcattcaaagtaattgctgaccatatccgtacagtaacattcgctgttggtgacggtgctcttccatctaacgaaggccgtggttatgtattacgtcgtttattacgccgcgctgttcgttattcgaagaaattaaacatcaatcgtccatttatgtttgaattagtaccggttgttggagaagtaatgaaagacttctatccagaagtacttgaaaagaaagatttcattgcgaaagttgtgaagaacgaagaagagcgtttccatgaaacacttcatgatggtgaagcgattttagctgaagtaattgcaaaagcaaaagaagaaaaaacaactgttatttctggagtagatgcgttccgtctatatgacacatacggtttcccaattgaattaacagaagaatatgcagaagaagctggcatgacagttgatcatgaaggttttgaaaatgaaatggaaaaacaacgtgagcgtgcacgtgctgctcgtcaagacgttgattctatgcaagttcaaggtggtgtccttggagaaattaaagtagcgagcgaattcgttggttacggtacagttgcaacagaaagtaacgttgttgcacttgtgaaaaatggcgaatacacagacagcttacaagctggtgaagaaggacagttaattcttgatgtaacaccattctatgctgagagcggtggacaaattgcagaccgtggttaccttcttgctgatggcgtgaaagttcttgtaaaagacgtacaaaaagcaccaaacggccaaaacttgcataaagttgttgttgaagaaggaacattaacgaaagatgcggctgtaaaagctattatcgatacgaaaaatcgtagtagcgttgtaaaaaatcatacagcaactcatttactacaccaagcattaaaagacgtacttggaacacacgttaaccaagcaggttctcttgtaacttctgaacgtctacgctttgacttctctcacttcggtcaagtacaagctgacgaattagaaaaaattgagcgtatggtaaacgagaaaatttgggaaagtattgatgttgagatttctcaaaaagcaatcgaagaagcgaaagaaatgggcgcaatggcattattcggtgaaaagtacggagatgttgtacgcgttgtacaagttggcgattacagcttagagctttgtggtggttgtcacgttgaaaatacagcttctatcggtattttcaaaatcgttgctgagtctggtatcggtgcaggaactcgtcgtattgaagcagtaactggtaagtctgcatacgaattaatgaacgatcaagtaggtttattaaaagaagcagcaggaaaaatgaaaacaaatccgaaagatattttaacaagagttgatggtctatttgctgaagtgaaacaactgcaaaaagaaaatgaatctcttgctgcgaaattaagcaatatcgaagctggaaacttaactgattctgtaatgacagttgatggtgtgaatgtattagcagcgaaagtaaatgttgcagatatgaacaacttacgtacgatgatggatgacttgaaaaataaattagagtcagcagttgttgtattagcgtctgttaatgacgataaagtaaacatcctagcaggtgtaacgaaagacttaattagccaaggttaccatgctggtaaacttgtgaaagaagtagcttctcgttgcggcggtggcggtggcggccgtcctgatatggcacaagcagggggtaaaaacccagctcaagtcgaagaagctttagcatttgtacaagagtacgttaaatctgtttcaaaataaagagatagtagtgtacaatggtagggagaggagaagttcttctccctatacttactatataagtgaggtgcttgaaatggacggttttgataaaacaatgaagtttagcattcaagatgaaaaacagagtgtccatgtaaatgatgtacttttaactgtgtatgatgcacttcaagaaaaaggctataatccgattaaccaaatcgtcggttatttattaagtggagacccagcatacatacctcgccataaagatgcacgtagcatcattcgcaagcttgaacgtgatgagttaattgaagagcttgtgaagtcttacttgaaacatcatcgtgaggagtagtttatgcggatattaggtttagatgtaggtacaaaaacagtcggagttgcaattagcgacgaaatgggctggacagcacaaggattagaaacaattaagattaacgaagaacgaggtcactttggttttgatcgtatttctgagttagtaaagcagtacaatgtggacaagatagtagtaggtttacctaaaaatatgaatggtacaattggcccgcgtggtgaagcgtgccaacaatttgcagaaaacctacgagagctgttacaattagacgttgtaatgtgggacgagcgtttgtcaacaatggcagcggaacgtctgctcatttcagccgatgtaagccgtaagaagcgaaagcaagtaattgataagatggctgcagtcgtaatcttacaaggatttttagatagtaaataagaggtgaccaaaatggaagaaaatcaaattacaattgtagacgaaaaaggtaacgaacatttatgtgaaattattttcacttttgacgctgaaaaatttggaaaaaaatcatacgtagtcttctctccaatcggtgaagtagacgaagatggagaccaaatttatgatgcaatggcttatgagcaaaatgaagaagagggcggaactttacttccaatcgaatctgaagaagagtgggaaatggtacaagaaatgttcaacactctagctgatgagcaagaagctgaataataagtactgaaaagatggacgacatacagtccatctttttttgtatttatatgtaaaatgaaagattttttgtcgaaactgtgtaagtctttgtagtataatgagacggattgtagaaaaataaagtgtcaattaaaaaagataagtgaattttttgcgtttttacatcgtgctgtatagaaaggtgtacatacggtctacaattaagtaaggaggaaatgttttgatagagaatcaagtgaaaaagaagcgtagacgtatctttttattttcgattattgcactgcttttagtttgtggttcagtctatgcgtatatttcatccgcattaggaccagttgatagcgggaataaaaaagagattgaagtagaaattccgaaaggatcatctacaagtaaaattggagaaattttagaagaaaaaggcgctgtaaaaaacggtacagtttttagtttttatacaaaggctaaatcgaaaagtttacaagcaggtacatatttattaaatccttcaatgaatgctgaagatgtgattgaacaaatgtcatctggcaacgtgcatcgtccagctctttataaagtgacgattaaagaaggggcgcaagtaactgaaattgcagaaacgattgcgacagaactaaagtggaataaagatgatgttacgcgtcaattaaacgataaagcatttattcaaaaaatgcagcaaaagtatccgaagttattaacggataaaatctttgatagcaatattaaatacccattagaaggttatttatatcctgcaacgtattcgttttataagaaagatacgacgttagaagaaattgtaattccaatgcttgagaaaacaaatgcaatcattgttcaaaatgaggcgaaaatgaaagcgaagaattgggatgttcatcagcttttaacattatcttcacttattgaagaagaggcaactggttttacagatcgtcaaaagatctctagtgtcttttataatcgtttagcaaaaggtatgccgcttcaaacggatccaacggtattatatgcacttggaaagcataaacaacgtgtattatacgaagatttaaaggtcaactcaccgtacaatacgtatgttgtaaaaggattaccggtagggccgatcgcaaactctggtaaacattcagtagaagctgcgttagaacctgcgcaaacagattattattatttcttagctgcaccaagtggtgaagtgtactatgcgaaaacattagaagagcataatgcattaaagcaaaaatacattacgaaaaaatagtgaaatggggagggatagcgaaaaaagtcgcacatccctcttttttgtggtaaaatatatcgggttaaaaactggcagaagaatcgtttttaatatcaaaacgggacgtacaagctaaggataaagctggcttgtatttttattgcattctatgtgtgaaaagacgtcatagaggcacttctccatgtaaataaggaggaccatttatggaggatgcagttaacgagtacctattatcatttattgatccgaaagataaattaattcttgaaatggaagaatatgcaacagaaaatcatgtgccgattatggatcgacttggaatggaatttatgctgcaatttttacgtttaattggaccgaaaagcattttagaacttggaacagcaatcggttattctagtattcgtatgatgcaagctattccaaattcacgtattgtgacagttgagcgcaatcgtgagcgatatgaaaaagcacttgaatatatagaacgttccccagtaacagatcgtatttcagttatttacggtgatgcgttagagacaggtgaacaagtaaaagaacacgggacatttgacgttatttttattgatgcagcaaaaggacagtatcgtcgcttttttgacttatatgaaccgttattaaatcctggtggcgtaattatttcagataatgttatgtaccacggtcttgtaacgacaaaagagaaaattgaaaacagacgtacacgtggtttaatccgtcgtattaagacgtacaatgagtggcttatgaaccatgaaggatatgatacaacgattttcccaattggtgatggagtagctgttagtaaaaagagagggtgaccaaggtatgaagaaacctgaattgttagtaacgccaagagcggtggcggatatcgaacaacttgcgaaagcaggagcagatgcggtaatgatcggtgagcaaaagtttggtttacgtttagcaggggagttttcacgtgaagatgtaaaacaagctgtgaagattgcacatgaaaatggtgtgaaagtatacgtagccatgaacgctatgttccacaacgataaagtagaagaattaacagattacgtttcatttttaaacgaagtaaatgtagatgcaattgttttcggagatccagcggtattaatggctgttcgtgaagtagcaccaaatatgcagttgcactggaatacagaaacgacagcaacaaactggttcacttgtaattactggggacaaagaggatcaaagcgtgctgtattagctcgtgagcttagcttagatgaaattgttgatttaaaagaaaatgctgaagtggaactggaagtacaaattcacggtatgacttgtatgttccaatcgaagcgttcattagtaggaaactactttgagtatcaaggacgtaatcttgacattgaaaagaaaaaatatgaagagaatatgttcttatatgacccagagcgtaacaataaatatccaatttatgaagatgaaaatggtactcacattatgagtccgaacgacatttgtttcatcgatgaattagaggaactaatcgatgctgaagttgatagcttaaaaatcgacggtgtactaaaaagctctgaatacattattgaagtaacgaagaaatatcgtcaagcgattgatttatgcgtagaagatcgtgatgcatattatgacgtgaaagatgatctatataaagaaatagaagaaatgcaaccagtaaatcgtccgttagatacaggattcttctttaaagaaacggtttactaaacgaggagggtgtaggaaatgactgtacaagaaatttcacgagtgatcgatggcaaacgtgttattgtgaagaaacctgaactgttaatccctgcgggtaacttagaaaaattaaaagtagctatccattacggggcagatgctgtatatttaggtggacaagaatttggtcttcgttcgaatgcaggtaactttacgctagaagaaatggcagaaggcgttgagtttgcaaagaagtatggagcgaaaatatacgtaacaacaaatatctttgcacataatgaaaatatggacgggctagaggaatatttaaaagggattgaaaaagctggcgtaacgggaattatcgttgctgatccgcttatcattgagacttgtaaacgcgtagcgccttctgttgaggtgcatttaagcacacagcaatcactatccaactggaaagcagcacagtattggaaagaagaaggtttacatcgtcttgtattagctcgtgaagcaagctatgaagaaatgaaagaaattaaagaaaaagtggatattgaaattgaagcgttcgtccatggtgcaatgtgtatcgcatattcaggaagatgtacattaagtaaccatatgacagcgcgtgattctaatcgtggtggttgttgccaatcttgccgctgggattatgatttagttcaaacagtatcacaacataaagatgcaaaagagcttcctctattccaagaaggagatgctcactttgcgatgagtccaaaagatttaaatttaattttatcaattccaaaaatgattgaaatcggaatcgatagcttaaaggtagaaggacgtatgaaatcaatccattacgtagcgactgtagcaactgtatatcgtaaagtaattgatgcgtattgtgcggatccagataactttgagtttaaacaagaatggttagatgagcttgataaatgtgcaaatcgtgatacagctcctgccttctttgaaggggttccaggacatcaagagcaaatgtttggaaatcatagtaagaaaacaacgtatgattttgctggtttagtgttagattataatgaagaaacgggcatcgtaacgattgagcaacgtaatcatttcaaaccaggacatgaagtggagttctttggaccagaaatagaaaactttacgcaaacggtggagaaaatttgggatgaggatggaaacgaattagatgcagcgagacatccgttgcaaatcgtgaaattcaaagtggatcaacgagtgtatgtgaataatatgatgcgcaaaagcatacttcaataagaaagagtgatagtcgaatggggacgaataagcctgttgtaattggaattgctggtggttcgggatcaggtaaaacgagtgtaacgaaagcgatttttgaccattttaaaggtcattctattttaatcttagagcaagattattattacaaagatcaaagccatttaccaatggaagagcgtttaaaaacaaattatgatcatccgcttgcgtttgataatgatctgttaattgaacatttgcagcagttgcttgcatatgagcaaattgataagcctgtatatgactatacattgcatacgcgttcagaagaaattattccggttgagccgaaagatgtaattattttagaaggaattcttattttagaagacccacgtctttgcgagttaatggacattaaattattcgttgatacggatgctgaccttcgtattctgcgccgcatgcaacgtgatattaaagagcgcggtcgtacgatggattcagttattgatcagtacgtaaatgttgtacgtccaatgcacaatcaatttattgagccttctaagaaatttgcggatattattatccctgaaggtggacaaaaccacgttgcaattgatattatggtgacaaaaattgcaacaattcttgaacaaaaagtaaatttgtaatagcatagtaaaagatatacggtaggaagggattttttcccttcttatcgaatacaatgaaacatgcaacctcatctatatataggtgagggcatatttatatcaactttccatacatatcttctttatataaagaagaattggaaatacggggttgtatgtgacaactccgctagtgcaagggtactagaaacctccgctaacaatggaagcggaggagttttcatatggaactcctcttttttttcgggggattggtatataaaaggagtggaaaatatgtcaacagaaaaaacataccctatgacgcaagagggtaagcaaaaactagagaacgaacttgagcaattaaaaacagtaagacgtaaagaagtagtagaacgtattaaaatcgcacgtagcttcggggatctttctgagaactctgagtacgatgcagcgaaagatgagcaagcgttcgtagaaggacgtattacacaattagaaaatatgattcgtaacgcagttatcattaaagatactggcgaagtatctactgttgttacattaggtaaaacagtaacatttaaagaattaccaaacggagatgaagaagcgtatacaatcgtaggtagcgcggaagctgatccattcgaaggaagaatttctaacgattctccaatcgcaaaaagcttattaggtaagcaaattggtgagaaagtaacaatccaaacaccaggcggagaaatgcaagtagagattgtctctgtaaaataaaaaaagattctcctatcgggagaatctttttttctgtcgaatgaaaaaaattgtgtaaaccttagagtgattcgacaaaaaatgtcaaaaaaacactttaagctttgatatcataattagagaccataggttttaaaagggaaaaggggctaattatgaaacataaaatctttacaggattggtttgtagtatctccatattaggacttgctgcatgcggaacgaatgaagaaactacatcatcaaagggagaaaaagtgaagcaagaagaaaaaaaggatattaaagcaactgagagttcaaaagccttagaaaatccacaagataaaaaggaatttaatgattttgatgtagcgtatcaattagcaattgtcatgaaaatatttcaagatgtaacgattaagtatgattacgcaattgggaatccagattatttattgcgagattcgatggatcaaaaaacaatagatgatatgaagaatatgttacaagaacaggcgaagaataatgataaaattttaaaagatgaagtgaatcaagcatatacatatttaaaacaatcgaaagtaagtaataaagatgatattcaaaaaataatagatgcacaaaataattatttacatattgtagataagatgattacttgtattgattctgtaacagttgagaatgcaaaagaaaaaagaaatgaaatggataatcttagtaaggattatttaaaaatagcggctaatgtaacaaccactgtaattgaagttgctaaaaacactggagtgaatgaaactgaatttagatcgcttcttatgaaatttttagagaagccaaagaaacaataatagccttatataatatctgtttttgttttggagattgtataaataaaatagtacctcgtctaaactacaatagacgaggtgttttttatgaaaataaaacggagaattacaattgttttaatttgttttatgagcgttatgtttgtattgctttgtcgtttaatccaaattcaaattatagatacagaatcatttactgatcgcaaaataaatttaattgaaaaaagtgttacgcaacgcacacaatccattacagtagacgatggacgtgggcagtttatagatcgtaatggtaaaaaaataggtgaggaaaaatatcctgttttaattatttttccatttttacaaataaaaaatgacatgttagagaaaatcgcgcatatcattggtgtgtcgagacaagagattagaagacaaatgaaaaataataaaaatgcatttacactacaaggagaaactgctccatttcgagtgacacgagagcagatggagaaggtaaatgaattacatgtattaggtattgtagcagctgaagtgcgattaaaacaaactggagagataaatcatttaattggtgatgtaggggagaacgaaagggagtttcaaaagcgatatggagaattgaaaagaatctcaaaacaaacgccgataggtatttcaggattacagcaatcatttgatgaatttctattgactgatggagaggcaaaagtattatatcaagtagatcggcaaggagaaccaattttcggaaagcaagcgaaatacacttcaccaggaaatccattttatccagttaggattcaaactactttacataaagagttgcagcaaaaagcagaagaagtgattgaagcgaatgaaataaagaaggggggactagtattacttgatgtaaagacaaatgaaatattagcgatggctagtaagccgtctttacaagtaagggatgagaatttatataaaactacacttgaaaatcaaatgttaacgccacattttccaggctctgtttttaaaacagtagttgcagctgcagtcattgatcaaaaagtaaatttgtttaatcggacatttaactgtaataaagatttatatggtgaaaacgacccgcaagttaggatgggtacacttaactttaaagagagctttgctaggagctgtaacaggacattttccgagttaggtaacgagctattacaaaaggataagacggtgctagaaacatacgtagcagctttaggagcaaatgaaaaggttggatggaaaggttctgtatttcatacacctcattttgagcaaatgccagaagaaaagggtactactatttgggggaatgaagaaaataaaaatagtaaaaaagcggtagaacaaacagcaattggacagaaagatgtacgtatatcacctctagcaattgcaaatatgatggcgacgattgcgaggaatggagaaaagatggaagtgaaagcagttgaaaaaatagtatataaaaatggagcggatttttttacatttgagagccatacgttaaatggaaaacagctttcgtatgaaacagtgaaaacattacaagagttattaagaggcgttgtaacaagggagaaaggaacaggaacggcattccgttcgttgccactaagtgtcgctggaaaatccgggacagcgcaaacagggaaagggacgagggtgaatcgctggtttgcaggttattttccgtatgagaatccaagatatgctttagttgttgttgatctagagactgatagcaaagtgaataaagttacacctatttttaaagatatggtaggagcaatctatcaattggagaatgaaaagtaatcttgcaatttatagtgaaatgtcttcatttcatgaaaatatcattgtaaatgttcaacctttctagatttaatgttacaatagcaattaggaaaaactgcatggaggtttggagaatggcaggaggatcaagattccaacagaaacaacaaaaacgtcgtcaaaacggtgttttaaatattgcaatcgctattgtattactattagtagctattgtagcatatcaattgttcgttcctagtacgaaagagcaagcatcttctactgataagaaagtctctcaacaaacaacaaagaatgagaaagctggaaaatcagaagataaagaatctgctaagaaaaaagaaaaagaacaagagcaagcagaagctaagaaaaaagctgaagaagagaagctaaaggctgaagaagaacagaaaaaagctgaagaagaagcgaaagctaacgagaaagtatcagctgagaaaactgtatctaaggcaaaagaggcgtatacaaaaccttcttggaaagctgtaggaacagaacaaggttcatcaccagcgatgacgtttaaacagggttcatcagattggaatgagatgcaaagtgcaattgctgcaggtgttgaagtaccgaaagagcaattagtattccattttgttggaagagacaaaactggaaagagcaaagcttatggtgatgttcaagataagcaaagtgggaaaagatattatgtaaatattgattgggtagacaatgagggctggaaaccagtacttgttcaaactctaaactaaaaaagagaggctccttaggagcttctcttttttgttaacgcaatttctttaatttaaaatgaacaaccgcgctataatacggtcttttgctttcaggatccataaccatttgatgtgagatgtgatgaacttcaagcataagtgctttattattatcaatttgttcactaatttttcgttctaaagaagctaagtctcccgcttcaaaaaactctactttatcttctaacatttcaaaggtaaatgacatgaagacggcccctctcctatgtaatcaactatagtgtaacaaagaaaagaaggaaataccatgtacatttcaattgacatttttagaaagagggaatatcatactgataaaaccgataagaaaaaggggaatttttatgggtacagaatttaatggtttatttgatgagtgggctcatacgtacgactcatttgtacaaggcgaagatatacaatataaagaagttttcgcccattatgaggacattctagaggatgtagttaacaagtcatttggtaatgtattagaatttggtgtcggtacaggtaatttaacaaataaattattacttgctggccgcacagtttacggtatagaaccgtcgcgtgaaatgcgcatgattgcaaaagagaaattgccaaaagaattttcaattacagacggtgattttctttcgtttgaagttccaaattcaattgataccattgtaagcacctatgcatttcatcatttaacagatgatgaaaaaaatgtagcgattgcgaagtatagtcaattgctaaacaaaggtggtaaaatagtgtttgctgatacgatatttgcagatcaagatgcatatgataaaactgttgaaacagcaaaacaaagaggtttccaccagttagcaaacgatttgcaaacggaatactatacacgtattccagttatgcagactatttttgaaaacaatggcttccatgtaacgttcacgagattaaatcatttcgtttgggtaatggaggcaactaagcaatagaaagagggattagattgagaattgctgtaattggagcaatggaagaagaagtacgtattttacgtgacaaattagaacaagcagagacagaaacggttgcaggttgtgaatttacgaaagggctattagcagggcatgaagtaatcttgttaaagtctggtattggtaaagtaaacgcagcgatgtcaacgacaattttattagaaaaatataagcctgaaaaagtaattaatactggttcagctggtggattccatcattctctaaacgttggtgatgtagttatttccactgaagttcgtcaccatgacgtagatgtaacaacatttaactatgaatatggtcaagtaccaggaatgccgcctggatttaaagctgatgaggcgttagttgcattagctgagaaatgtatgcaggctgaagaaaatattcaagttgtaaaaggtatgattgcaacaggtgattcatttatgagtgattcgaaccgcgttgcagccatccgtgataaatttgaaaatctttatgcggtagaaatggaagcagcagctgttgcacaagtatgccaccaatatgaaattccgtttgttatcattcgcgcactttctgatattgctggtaaagaatcaaatgtttcatttgatcagtttttagatcaagcagctcttcattctacaaactttatcgtaaaagtgttagaagagttaaagtaatgtaacaaaaaggcaactgtctcatataaagaaaatacatacagttgccttttctttattggcaaacaagggggagaacacgatgaatgtatatcgtggagttcatgagttaattggtcatacaccaattgtagaaattactcgtttttcacttccgaaaggagtccgtttatttgcaaagcttgaattttataacccaggcggaagcgttaaggatcgtttaggaagagaattaatcgaagatgcgctagaaaaagggcttgtgacccagggtggaacaattattgaaccgactgctgggaatactggtattggactggcacttgcagcattagaacatgatttacgtgttattgtttgtgtaccagagaaatttagtattgaaaaacaagaattaatgaaagcactaggtgcaacggtcgtgcatacaccgactgagcaaggaatgaccggtgcaattgctaaagcaaaagagttagtaaatgaactaccgaattcatactctccaagtcagttcgcaaatgaggcaaatcctcgtgcatattttaaaacactaggacctgaactgtgggacgcattgaatggagagattaacatatttgttgctggagcaggaactggcggtacgtttatggggactgcatcttatttgaaagaaaaaaatatagatattaaaacagttatcgtagagccagaaggatctattttaaatggtggtaaggctggttcacatgagaccgaaggaattggactggaatttatcccgccatttttgaagacatcttattttgatgaaattcatacgatttctgatcgaaatgcatttttacgagtgaaagaattagcgaaaaaagaaggacttctcgttgggagctcttcaggagcagcatttcatgcgagcttacttgaggccgagaaggcagcaccaggtacaaatattgtaacgatttttcctgatagcagtgagcgctatttaagtaaagacatatacaaaggatgggaataaaaaatgagagcaaagacaaagttaattcatggtattcgcataggagaaccttcaactggatctgtaaacgtaccgatttatcaaacaagtacgtacaaacaagaagcagttggtaagcatcaaggatatgaatattcacgtacaggtaacccaacacgtgcagctttagaagaaatgattgctgtattagaaaatgggcatgctggatttgcatttggttcaggaatggctgctattacagcgacaattatgttgttctcaaaaggtgaccacgttattttaacagatgatgtttatggcggaacataccgcgttattacgaaagtattaaaccgtttcggtattgagcatacatttgtagatacaacaaacttagaggaagttgaagaagcgattcgtccaaatacgaaagcaatttatgtggaaacaccaacgaacccactactaaaaattactgatattaagaaaatatctactcttgctaaagagaaagacctattaacaattattgataacacattcatgacgccatattggcagtcgccgatttctttaggagcagatattgtgcttcatagtgcaacgaaatatttaggaggtcatagtgatgtagttgcaggtttagtagttgtaaatagcccacaactagcagaagatcttcactttgtacaaaactcaacaggaggtattcttgggccacaagatagcttcttactacttcgcggtttaaaaacattaggaattcgtatggaagaacatgaaacgaattcacgtgctattgctgagttcttaaataatcatccaaaagtaaataaagtatattacccaggtcttgaatcacatcaaaatcacgaattagcaacagaacaagcaaacgggtttggtgctattatctcatttgatgtagatagtgaagaaacattaaataaagtacttgagaaactacaatactttacacttgctgaaagcttaggagcggtagaaagtttaatttctattccatctcaaatgacacatgcatcaatcccggctgatcgccgcaaagaattaggaattacagatacattatttcgtatttctgtcggtattgaagatggtgaagatttaattgaagatttagcacaagcgctagcataataaaaaatgcactgctctatattagcagtgcgtttttttattacgtctattttgtgaaacatttcacaaaatagacatacacaaacgaaatgatttcatgtatattgaattcaggaaacgttactcacgaacaaacttgtgaaacttttcacaaacaatgaaattcatgtaggaaagcatctctatttttttgtgttaattgggacttattttgacctacagggacatataaggaccgtaatagtagaataggaggaaattcacatggtagtcaaagagaaagttgtaaatgaaatgcaggaagtaaaaaagatgattgatacgctagtaaataatggtcaacaagctttacaagcattagaaagttttacacaagaggaaattgacaacattgttcatgaaatggcattagcaggtgttgatcaacatatgccgctagcgaaattggcagttgaagaaactggccgtggtgtatatgaagacaaatgcattaaaaatatttttgccactgaatatatttggcatagtataaagcaagataaaacggtagggattattcacgaagatcctcatgaagaaataatagaaatcgcggaacctgtcggtgtagtagctggagtaacaccagtaacgaatccaacgtcgacaacaatgtttaaagcgttaattgcgataaaaacaagaaatccaattattttcgcatttcatccttccgcacaaaaatgttctgtggcagcagcgaaaaccgtatatgatgcagcgatgaaagctggtgcaccaaaacactgtattcaatggattgaaagaccgtctgttgaagcgacgaaacaattgatgaaccatgatggtgtagcactcgttctagcaactggaggcgctggtatggtgaaatcagcttactctactggaaaaccagcgttaggcgttggtcctggtaatgtaccgtgttatatagaaaaatcagcacatgtaaaacgagctgttaatgatttaattttatcaaaaacatttgataacggtatgatttgtgcatcggaacaagcaatcattgtcgataaagaaatttatgatgatgttaaaacagaaatgattgaaaacagttgttactttgtaacagaagaagaaagaaaaaaattagaaaagctcgttataaatgaaaatacatgtgcagtaaatagtgatattgtagggaaatccgcacagtatattgccgatttagttgggatcactgttcctggacatacaaaaatgcttgtagctgaaattcaaggtatcggagcagcatatccgttatcccgtgagaaactgagtccagtattagcttgtgtgaaggcaaattcattagaagaaggatttacatattgcgaagaaatgttgaacctcggtggtttaggacattcagcagttatccattctacaaataaagatgtgcaaaagcaatttgggttacgtatgaaagcttgccgtctcattgtaaatgcaccttcatcacaaggtggaataggggatatatataatggatttattccatcacttacacttggttgtggttcatacggaaagaattcagtttcccaaaatgtaacagcgactcatttattaaatataaaaaggctggcaaatagaaaaaagaatatgcagtggttcaaactgccaccaaaaatttattttgaaaaacatgctacagcttatttagcaaatatgcctaacatttcacgtgcatttattgtaacggactccggaatggttgaacatggctatgtcgatacagtcgcgcactatttaaacaagaatgcaaatgatgtgaaagttgaagttttctttgaggtcgaaccagatccatcagatgaaactgttttcaaaggtgcggaaatgatgaaaagctttaagccagatgtaattatcgcacttggtggtggttcagctatggatgcagcaaaaggaatgtggttattctatgagcatccagaaacgacattctatggtattaaacagaaatttttagatataagaaaacgtacatgtaaatatccggaattaggaaataaggcgcagtttgttgcgattccaacgacatcaggaacgggatcagaagtgacaccatttgcggttattacagataagaaaaataatataaagtatccgctcgcagattatgaattaacaccagatgtagcaattgttgatccacaatttgtaatgacagtaccaccacatgtaacagcagatactggtatggatgttttaacacatgcaattgaggcgtatgtgtctgttatggcaaatgactatacagatggattagcattaaaagctattgatctcgtattcaaatatttaccgagagcatataaagatggaaatgatgaagaagcaagagaaaaaatgcataacgcttctgcaattgcagggatggcatttgcaaatgctttcctcggtattaatcacagcttagcacataagattggaccagaattccatattccgcacggacgcgcaaatgccattctaatgccgcacgtagtccgctataatgctattaagccaagaaaacacgcattgttcccaaaatatgagcactttgtggcagatgaaagatatgcacatatagcgagaatgctcgggcttccagcaagttcggcagcagaaggggtggaatcactcgtccgagcaattattgagcttggaaaaagcttaaatattaatatgagtattgcgggacaaggagtcgataaagagcaatttgaagaggttgttggagtattagcagaaagagcttttgaagatcaatgtacaactgctaatccaaagttaccgcttatttcagagctgaaagaaatttatatggaagcatataaaggtgaataatgataaaaaaagagccgcagtaaaagcggctctttttttattggaaaacatctcccagaatggctgtatttactggtctttcagtttcatagaatatgatacagtgaaatggaggagtgagaatataatgaaagaattaaaaggaaaaatagaagattatactcggtttggacaaatgcttctcgctgtaagtacattgttaatggttggcttattgattccgagtggagcaaaagagacaatccaattttttgttatgatggggagcatcgttatatttttaagcttatcgttctttttctttcagcgtgtgaaagtgatgcgtgaccagctagaggaaaatgaatgtgaataatattgttaactagagcgcagcgaaaagaaaaaatctttttgtcgcgctttttgttttttgtaggaaaatatatgtgtttcgtgttgacaatgataatccttatcaattaaagtataatagtagttaatgattatcattatcgattagaggtgaagaaatgaagaaatctattacgctatttacagcgattttatccatttttttcttgttaataggttgcagtgccaaaggggacgaaaaagcgtctgcaaccaaaacagaaaaaggaaaagagaaaatcgaaattaccgacctatcaggaagaaaggtaacattcgataaagtgccagaaagttttgcaacattaagtatgggggacatggatattattcatgctttaggtggaaaaatagtaggtcgcccggatacgaaattaactcttccagaggagttaaagaaagcacaagtaattgggaatgcacatcaaccgaattttgagcaaattgctagtttgaagcccgatgtacttgttgctaacaatggattccaaaagaatgtgccaacggttgaaggacaaggaacgcaagttatcatttcttctgcgaattctgtacaagatattcaaaagaatattgaattatatggaacggtaatgaagaaagaagataaagcaaaagaaattaatcaaaaaatgaatgatcaaatgaagaaatatgagaaaaaaagtgatgtgaaagcattgctagtgtatggcgcaccaggaacttatttagcggcattaccaacatctttatcaggtgatattttagaaaaaacaggcggaaaaaatattgcttctgattttccagaaacgaaagaatatccgcaatatgcacagctaagtgtagaacgtattattgaggcgaatccagatgtcatttatttaattacacacggagatccaaaaagtgtgaaaaaagcatttgaaggcgaaatgatgaaaaatgaagcgtggaaaaatttagaggcagtaaaacaaaaccgcgtagttattttgccacctgatttatttggatctaatcctggtacaaaagttacagaagcaatggactttatgtataaaagtatacaagatgtaaggaaatgatacgtatggaaagtagtgaagtagtaagagaaaaggaacatccttttgcgaaaaaaagatggataatagcagttactttagttgtattaacaatcctaggtctcttttacggtctcttcgcaggaagtttatccttttctgtacgagatattttaacaggtatacaagaggaaggttcgacagttcatcgaattgtatgggatcttcgcataccgagagtgctcattgggtttatagtaggaacatgtttagctgcatctggtacactgctacaaggggttatgagaaaccctcttgcagatcctggtattatcggagtttcatctggggcaggccttgtagcaattgtcatcatgattttattcccacagcatctagcttttttaccactaggggcgtttttaggagctttcataacagcaatggttatttatgctttatcatggcaaaaaggggcatcaccttcaagaatcgtcttagtaggggtgtcgatcaatgcattaattggtgcagcaacgtcagcattaatgttattacatagtgacaaagtacaatcggtgttaccgtggctagcgggcggtattggtggtgtaagttgggcacatttaaacatgattatttattatgcaatattcgccattatattagctttctttggtattaagcatattcgagtgttaatgcttggagatgaaatggcaaagttattaggacataacgtggaaaaaagtcggttttatttaatcgtagtaagtacattattagctggaattgcagtaagtgtgtctggtcttattggatttgtcggtcttgtcgtaccacatatgctacgtttattagttggaaatgattatagatatttgctacctttatcatgccttggcggcggggtattacttgtttttgcggatgcaatagctcgaagttggtttgacccaatcgaattgcctgttggtattttactgtccttcttaggtggtccgttcttcttatatttaattcatagaggaggaaaacaaagtgatttccgttaacaaagtgttttacgcacactctgaaagatttcaaatgcaaaatatgaatgtacatattaaggttggagaaatcgttagtttaattggtccgaatggatcgggaaaatctactttgcttcgtttaatagcaaggctactgaaacaaagcgaaggggacatcattttagatgggaaaaatattcatatgatgaagagtgctgatgtagcgaagcaattagcaatgttaccacaaatgcatgatcatcaattagatttaacagtgaaagaactaattgagttcggaagaggtccacataaatcatggagtagccacttaaataaagaagatgaagaaattgttgattgggcattgtctgttacaaatcttgaagggtatgaatatcgtcttttacattctttatcaggaggggaacggcaacgtgcttggattgcgatgacgctagcgcaacgtacaaatgtcttattattggatgaaccaacaacctttttagatatcgttcaccagttggaagtaatggaacttgttaaacgattaaatgaggagtttggaatgacaattataatggttttgcatgacattaaccaagctgctcaatatagcgatcgtttacttgtattaaagcgaggaaaaattcagtatgatggtataccagaagaagtactatgccatgaaatgtttcaacatgtgtttggcatagatgtagatatttttcagggaagtgacaagcctttttttacaccgaaacgaatttctaaaaggggagaagagcgatgcaagcagaagagcgtattaccattgaattagtaagagaatttgttatggcagctcacggggatttagagaaagtacaagagctattggttgaatcaccaagcttacttcacgcctcttataattggggtggatcagattgggaaagtgcgttaggcgcatcggcacatgtaggtcgtaaagatattgctctttatttactagaaaagggtgctcggatggatatttttgcagcagctatgcttggtgaattagaagttgtacaagctattttagtagctcaaccagaagcattgcgtgcatctggtcctcatggtatttctcttcttcaacatgcacgaatgggtggagagaaatctaagcgtgtatatgattatttagcaatactatcttaatgaacggaagaagttcttatgtgcggtaaacttttcacttgaaacaattggaaagtttaccgcccgttagaacgggataagtatctagtatatttgaaaatcctacacccccctcaattgtagttttctttatgctagttatgatatggatgcagtggacaatatttgtctactgctttttttgtttctataagattgaatattctgtgttatgtagttgattcatttataataaatggtaacatttattgtgcatacaaaatatgatcgtgaaattaagaataaattagtggaaaggagtgaaggaatgtttcatacagaccgtttacaaattcgtaaatatacaatggatgatttacagttctacgcttcactatggggaaacgaaaaagtaatgcgctatattggaaacgggaagttaaaaacatatatgcaatgtaaaaaaagtttggaggagtgggtaattcctagctataaaaacggcctcggtttatttgtattaattgaaaaggaaacgggaatacggattggtcatgcaggattagtaaagcagcagatagatggaaaagaggaaattgaaattggttattggttattacctcagtattggggaaaaggctatgcgaaagaagcagcggcagcatttcgagactatggcttccaagcgttaagaatgaataaattgatttctcttattaatccggatcaccccgcctcaatctttgttgctagaaaaacggggcttagttatgagaaaacaacttcatttcatgggatggatgttctcgtttattccattaggcgcgttggatgaaaaaaggttaattgcattttttgaagaatggtatataaaaataaaggggggattacatgtacatttatcataatggacttattattcgtgagggaacgaatggtgtacctgcatatgcaattaagactttatttgaagatgccggttggagcaatgataatatcccttcttggcaaattgaaaaattcacgatagcatttgaaaattcaacatgggcattcacaatttgggatgaagaagagatgattgccatggttagagtcgtttctgatggaatcatggtcgcgaacatagtaaatttagttgtgaaatgtgaatatagagggaagggattaggtaagaaacttgtcgctctttgcttgcaaaagctaccacatggtgactggtttgcacatacttctgcgaacaattttgatttttatagaagctgtggatttgaagttagagagctatcgagaaatggaacatgtgcgtattatggatatcaagtcgcgaaaagagatggtcaccgataaatgaatgaaaagtaaaagtttagcgaggtaattttgaggatttgataatagagaatggattgaggcacattttatgataaaataaaagaaaattctgtttattattagggggataaaaatgagtataaaagttggggatgtatttaaatatgaaagaagatttactgaggaagaggtgtttgaatttgcaaatattaccggagataaaggtagacaccatgtggaatatgatgaaaatggaagattaatggtccatggtttattgactgctagcattggaacgaaagtaggcgaagaattacattacatagcaagagaattagtaagtgagtttattagaccagttttcacaggagatacgatcacttgtgaattaactttaacaaatgttgagcaaatggaaggctataaaaaagtttcaatcgagtcagtttatcgcaatcaacacgaaaagactgtactagtggggacaagttatggaattataaggggataaaaaagaagcctgtttagcaggcttcttttttattatttagtaaacacgttttcgattttccgcataactagagatgagtagtaatgcagtttcttctcctatattacgaacaatatgaggaacgcatgcattccatgagaaagaatcaccttcttctacaattgcaatatcttcaccgtgctgaacttctagttttccgcgtaatacaaggtgacattcttccccttcatgggcatttggtgagttttctttcgggaatccagtagggatttctactaaagataggcgaaggcccccttgctccgcaacatgttcaattctttgctcatctttgccgtatacactgtatttccgttcttcttttttgacaatttttaatcgatctttttgctctaacaataaatagggaaggggaacgtttaaaaaattggagatcgtttctaaagttgagatagatggtgatgttttattattttcaacctgactcataaatcctttagaaagacctgttccctcacaaatttgtgcgattgttatgcccctacgttgacgaatttcacgtattgcagaaccaatattcataaaatcaagctcctttttgtaaacaactatttgtatcatagcaaaaaaaatatattttttcccagtgaaaatgaattgacgaataaaaaaaattagtgtatgttttgtaatgtaaataaaagttttgtataagaaaactataaaggagagaaagaaatgaatcaacatattggtaacttaattattcgtatcgtgttaggggtaacattcttcatgcacggtttaacaaaattccaatcaggaattgacaatattgcagggtggtttacaagcattggtttaccaggaggacttgcatacggtgtagcaacatttgaattagttggaggcctattattaattctaggtttaggtgtaagatatattggattattatttgcacttgttatggttggagcaatcgtaaaagtgaaatggtcagctggtttattgggagatggaaaaaatcctggtttcgaattagaacttgcattattagcaatgggtgcatacttatttgttgcaaaagctgatggttttgtagataatttcttaaaagaaaaaatgtcaaagaagaactaatttaaatggggggctaacaagatgagttttcaacttcatcccgatacaacactggatgttgttcatttatacgtatctaatgtaaagaaatcactagagttttatacggaagtactaagtatgaaggtgctaaaagaagaaaaagcagtcgttacatttgggaatgaaaatgatgaaccacttcttatcattgaagaaaagaaagaagcttttccgaagcaaagaggaagaacagggttatatcattacgcaattttattaccaagtaggcaggatttagcgaatgttcttcgtcatcttgtagaaatggtatatccactacatggtggggccgatcattactttagtgaagctctttatttagctgatccagatggaaacgggattgaaatttatcatgatcgacaaaaagaagtttggcgtgatgagaatggagagctcccatttgttagtaacccgttagctggtgaagaattattgcagcaaggaagtacatggagtggatttccagctggtactgtgatggggcatattcatttccatgtagctgatttagaggaagcgaaacgtttctatgttgatggtcttggttttgaagtaacaatcccagctcgtaatggagcgttgttcgtatcagcaggtggctatcatcaccatatcggtttaaatacatggcaaggtgaaggggtaccaccgcaaatgccaggttctgttggtttgaaatatttcacaattgtattagcggatgaaaaacaaaaagagcaagtatgtgaaagcttaaaaaatattggtaagattgctacgtacaaagatggaatattacaagtcgaggatccatttggacattgtatccatttccaaataaaaagagaagcctaaaaaggcttctcttttttattttcttataattgcattttcgttttgtaaaaatagttcatcaaattgttttgcaagctcaaaatctagtttcgttaaaccttttgcattccaagatgacaaagtaataataactgctttatactggataaggataaatggatggtgattatgttcttctgatagtttggcggcttcagagacaaattcgactccttttaagtagtcggaaaacatatattttcgttcaatccatttctcatcttttaccatccatttatctaccttcaataattcctcgtgaacttcttcttcagttaatcttagcatcatttttcacatcctttattggaagtaacgcaagaccattgttaataaggcgtgttacagcttcgtcagttgtgaaagtagaaagttgatgtagtaatgctgcagatgtttcatgccctttgttatgctctaaaagtaactctaatacttcaaggcgcagcaaccattctttcgcataaaatttatttaatacttcttgaattgctactaattgatcgatatgcgcgtcgtgtaaaatcccctcacttcgaatatctcgaactgtttgatacatacgctcgagttcattcagtacaagcggagcaggaatttcttgaacttcttcatccattgggaaaaatgctgctgcatctgcggcacctgggaatactgaagtgatttgtgagccaacagccatatcaaatgcgccccatgaagcatcaaataaaacgcgggcgttataagtaactgtgcaatcgataaaggaaataagagcaattttcttatcatttttcacaatatctgttactgttccttttacatgaataccacttgcaaaagtaaactcagcgatagttccaattttaattcctaatgattgtagttgttcgtctgtacaattttctaatgcaatattttcagtaagtaatccaatcggtgttccaaatccgtcactgtgtacagaagtagaatgattcgctaactgtttattatgaagcgctaatgccgttggcgaatttgttcgcatgtaaattaattcacctgcatcgttttcaattgtctcgctaaatgtacctgtgatttgtaatccactatttagctcagctgttgcatagttctcagagcgaattgctttttctaaaccttcttttccacctgttttaaaggccatcgttttagaaaatgtttcaagcgcatctgttaattcttcaaaggattcacaaacaaatagttgtggttgcatttttgttacgtcataagttgtccctgtacatgcttcgatagaaaatggaaccttttctacagcgtctgttaagcaatgtttgctttcgccaacagaagaaaggagaccagcaccatatatctttggatcatctatatttccgatcaatccatattctactgtccaccagaaaagacgtgaaatttgttcagcttccgataaaccagaaactaagttttgtttttcaattacagcattttcagcagccttaacttcatcaggagtagaagtagggctttcttttactatcgttaatgtacgaacagcttcaaatgcatcatgttcttcttttgtagagaaagcttttgcaccaatttgcccaaaacgtttcacatattttgcatatgtaggatcaagtaaaatcggtgcgtgtcctgcggcttcatgtacgatatctggagctggtgtgtactcgatattttctactttccggatatctgttgcaatcggtagtaatccgtgtccttgaaaatcgaagaatgctacgccaggaataagtccgtcaattgttacagcgccccagccgcttggtgccaaacactcattcatttcttctacttttggaattgcatctatattaataccagatgattgtagtccgttcacataggctggatgagcaacgtcttttaagaagctatgattttgtctcataatgtaacgccacacagcgtgattcaccggtgtgtattgatcataatgttgtgtggatacaaatggttttaaatgcgatggaatttctgttttctttgtcatttagacatcctcctttttttcaataaaattgaatatcgatttcgtatagcttgtatcaccccctttcattttttttgtaagcgcttataaaattttatcataagattcggaattatttaacatatgtttctgtgataaatagaaaaagcccctatcggaaaatccgataggggcgaaagaatcgcggtaccaccctatttgtaagtgaaaatatacttacatctcaattaatgataacggaaaaattccgtcttttcctccatgcataaaagcattacgaaaaagaagctccagaattgtaattcatacttatatatgtgctaatttccaccgaccattagctctctgtaacagggatataagatactactgcgattctttcaacgcgtatatatgaaattgtgtaagaggatggatgcaaaaaagtccctatcggaaaatccgatagggacgataaaaatcgcggtaccaccctatttgtaaacaactaattgtttaccactcactttacgataacggaaagatccgtctttctcttcatgcataaaaagcattacgggaaagaagctccagaattgtaattcacgcttgtatatgtactgattcgcaccaaccatcagttctctgggacagtgatataagtcgctactagcattccttcaaagccgatatataattcgttaaactaaactatgttttgtattataaaactatattaaaaaaattgtcaacaaaaattttttatcccgtgttaatgagcagtaaaattcctacctcaaaattcggtgggagaataattgcccgtaacccccgattggtgaaggctaataatcagtggggatgaacaaaatctctactgattaaggtttcactttatttcacttctaaattaacagttaaattagaggtattgccagctgcatcagttgctacaatgtgaatagtatttttttcttcgtgtaattgagtgcgatcgaaataaatgtcatagcttttctcccaagggttcaggaatgcctgttcccatacaccatttccgttaatttcatattgcattctcactggaataccaggtgctttttttagctcagcatgataagactgagcattactattttgtaaatctggagcatgctgaatattactttgagcagcgagaggtgcatgttgcaattctacaattactgatatttcttttgttgttttcgtttcaacattttgagcaattttatgttctccccactgttcaatcgttgtttttaattgtggactaaattgcttctccttttgtagtgattcagcatgagcgcttaaagctccaaaactagaaaagacaagcgccatgcttaatagtgtagatgtagtttttttcattgatactccccctaataaaaagtgacaatattcagaaattaaatcttacattttagttataacttataaatataaatgttggctaaactatactttcaacataattcataccaatcctctatgaattgaaaatttcttgggaaattttttctgattatgtcgaatcgatatttttcacatattgtaggaagaaagtgaggaatgctatgagggaaatggagtgatggtatgaaaaggctaatagtaagtggtagtgtagtgttgtttatgtttttgtgttctatcactattactagcgcagaaaataatagtgtgaaagttgcttttattcgtcatcataacctttggattaaagttgaggggaaagaaaaacaacttacaaaaggagagaacataacagggccaaagtggtcacatgatggagaatggctggcatatgtaaaagggaagaaacaaaatattcttgagttatatcggctgaaagatggaaagaaagttacgccgtttcactcagaagcatcgaattatcaatggtcaccaacagaaaatataattgcatttatatttacaggtacattaaatacatttgatgtagaaaaaaagaatgcagattttgaaaatgtatcggctggtgtaggggattatgcatggtaccccgatggaaagaactttcttgtatcctctgaagcgcacttacttccaacaggatggacaggggctcagctatatgaagtgcaaaaagatgcacatatgaatcctcacaaaatgaagcatttgtatgcattgccaaatcaacatgatgatttcctagcgctagtagcaagtggctttaagtggtcaccagatcaaaagtggatttcatttttagcagtaccgacagcttcatggtcagctgatagtaatacgctttgcttagttcgtgcagatggcagtcggtttgaaaaagtagatcaaatgttactaaacgcacaatggtttcaatgggcaccatcaaaaaatatattagcttatattgaagggagcggaagagttgcattagaaaataagcatttaaaagtaaaggaattgccagcacttcagcagaacatatttacgccgaaaggatatgttgattgggattttgtatggaagaacgatagagtaattatcgtttcacgagcaaaggaggcagggatagaaactccaccagaaaaaaggccactaccatctttgtatgaggtcgatagtacaagtaatgcacagcatcaaatcacaaagaaaaagaacaagcaaggggattaccacccgatcttcatgaagaagagtaatcaattaatttggatacgttcagaccgtaagaaagcggatgtatggcttgctcataaagatgggaaacaggaaaagaagtggattgaaaatatagatgtaccagcgtggtattatgagaaatggaattgggaaaatgtcatctcggtgaaataacaataaaaaactgcctaaaagatcattttaggcagttttttattgttatttatgcgttttatttggcttttttttcgctgggtttccgttcccttggcgctttctattttgttcatcttttgcttgtttttcatgtagtgtatctaaaaattcattcgagtatataaatgctaacttaaatatgtacattaacgcttgaataaatatgtacattttccctttgataactaaaaattcttttgtttttcagttgacatactaccgcaggtcttattacctatttatgtatggagtgttcttatcattcatatagcaagtgaagcaaacaaaaaatagccgacttttatataaaagtcggctgctttcttataattcgagctctcccatacgaagaagctccacaactgcttgtgaacgtcctttaacccctagcttttgcattgcgtttgagatatggttgcgaactgtcttttcacttataaaaagttcacctgcaatttccttcgttgttttatcttgaaccagcaattcaaatacttctctctctctctttgtgagtaaaggtttagattgatacgctttttccttcaactggtataaccctccttgcttaagccagagctgtgtatgtgtaagttgggtgtttatttagtcaagatattgtatgaacgaaatgtgcaggtggtgaatgaaaatgggctttatttcctatgttattttagacttttatacagtgcgtacactctttttatccacttactttccaacgcgccatatttgttctagcaatatacttacaaccgtacctacaaataaaccattaccgaatatatattgcataacagacggcaaggattggagtgctccagacggtaaaaacataacgccgctgccaaataatactgcaacgcctaagatcgttacattcctttcactcatcggcacttgttttatattattaaatccaattccaattaactgtacgaacgaagccattaaaacagccgatgcgacagctgatggtaaagatgctaagtaacgaataatacttggaaaaagagacattacgactagtaacgcacatgccattaagaacgatcgtatatacttttgttttgttaaacgtatgaatcctgccgttgctggtaacggaacgacacctacagttgaaaatacagaagagatgagatgcgaaatccccccaacccatgttccatctttcaactgtttttgttcaatagtcgctttatgaatagttgcttgattaattgctataatagctgccaccgtattcgaaactaaaatacataccataacgaaacttgatacagccatacctgtattccattttggaagtccccaagcaaatatatgtggaagttgcacaaaatgagttacttgagatgggattgtcacttttcctgcaatgagaaaaataatccacccactaattaatcctattaaaactgcataacttttgacaaagccttttccaaaattagatagtataataacgaacagaaatatactaaacgcgatcattgctgtaaatccgtcgatttgagaaatagtagctgtaattcctaacattccttttaaaaatacaccacttaattgtaaacataataaaagtaaaaacgtccctgtcacaagcggcgtaaataaaaataaaatacgtcctataaaaccagttactcctaatcctattaaaataacaccggagattatcattcctaattctaaaatttgcagtgtactatgtaattgatcctgtccggccgttgcataagcaagtacggtaaatacaccaacccaagatccagccagcccatccgcaattggcagtctatgcccaagccacccttgtaaaaaagaagatataccaactacaaaaaacgtacgctgcattaaataaaatatttcttccgtcgtaagatgaaataatccgccaacgacaattggtagtgctattgaatttgctaataaaaatataaaccattgcaaagttcccataatatgattttggttatgttgattgtccaattttttcatcccttctagctttcctataaaaatatattgtaagaataaaaaagaagagttctatactcaccattagaaccctcctcaaaatatttaaacgattcttctacacaagattatttaattccacctcatttaaacttccaacaacaatatttcctttatacacgactaaacgtttttctgtttgacgcgctactgcttcagcagcgcatgtcgcattcgtcaaaacaaagctcgcttcatcccctacattcggccatactcgcttcccttcattatttaacgtttcttttccccctgtaataaagcggagtgcttttcctaaagacctttcgtcactccacccaaaacgctctgctaatcgattcgccttttgaagcatatcacctgttccaaacggtgaccaatgatctgtaatgctatcattgcctaatgcaaccttaacaccttttttatctaataacggaattgggattacttgtttaccaattggcactgttgaagtaatatcaatatttacatttgcgagtctttctgccacttcttcagcctctttaccagtaacaccaccaagtccaagtgcatgactaatcgttacacggccttgccatcctgcttcttctgttaaacttgccaatctcttcatcgtaaacgttccaagattattcgcatcgtgcaaatgaatatcaacatccgcattaaattctactgcgatatccataattgtatgtaatgacttttcaatgtcattatctactgtagctggatctactcctccgactagatgagcacccatacgcatcgcatctttcacgagttgcacagaatcactgcgcaataatccatgttgcggaaacgcaacaattctactagacactcgatttttatatgtttctaatgccgctaacgtcgcctccagattaccaagcccaataatcggatcgacattacaatgcgttctaatattcgttgcaccattttgcagtagtaactctagcatattttccgctctatttcgggcagtcgctaattgctttggtaaaattttttcttcttcattaaaacgtgtaaaaatactttctgctggcatacaagctttccatgggccactataatatgttttatcaatgtgaatgtgcatctctttgaaagctggcaacattaataagttcttagcatcaaaagttactatatcttcctcttgaacaatcccttttataatttttttaattcgaccatcttcaataagtaaactgcataattctgtttctgtttttgaaattctctcttcttcatatgtatatcctgattcaagcattacgttagccaaccaatatactgtcatctctatttccccaccctttattaaaaatcacctcataactacaattttaatatccactgaaaattaagacaattaatacgatcacttctcacaaaaaaatgtaatacaaccccatagtcttctcataaatttccatatagaataaaagtatgcagtttgatataaaaaggagttgattggaatatgtcaaaaaagttatgtaaatccgaaactgataaaatgctatttggtatatgtggtggtttaggagaatattttgatattagctctactcttattcgtatcatttgggttattgctgttttatgttttgggacaggatttttagtttatttcatttgtttattacttatgccacgttcgtactaacggcattatttcacatacttaagaagagcaaatcacctatagaatcctataggtgattttttcatgaagaatatttcatcgttaaatgtaataccgctacttcttcttcttcatttttataaatatgcttcttattcgcttcaaattgaatggaatcaaactcatttaattcgtatacatcattctccacttgaatagacactttccctttcattaccgttacaagctcaatcgcaccttcatgatgagcttctggctcatatatactatttgatcgtaaacaagcacggtgcatttccatccctgtttctttcgtataacggaacatcgtttctaaatgccacgcttgtccttcatctactgcaaatccttctccacagcgcgcaacagctacaggttctccaacaaccattaatctggataaaggaattgataaccctttcgttattttccaaatgacagctagtgtcggatttgtttcccctctttcgatctttcctaatgttaatttactaactcctgttttatgagctaattcttctaaacttaatttctgttcatttcgaatttgtctcaataactgtccaacttgttgaatgacttctttcgtttgcatatcttcattttctttcatatataaaaccaccttaaagtataaaatagtttacttttaataattaaaagtatatcatactatacataattatttattttcgaaaggagtgttatacttcatgcgcgcaattttattaggtcttttatcatcggcctttttttctgcaacctttattattaatagagcaatgaatgtatctggaacgagctgggcttggacagcttccttccgttttttatttgctcttcctattttattccttatcgttttatttcgcaaaaactttaggggattatgggaagagttaaaaaaacatccattggcatggatcggatggggttctgttgccggtattggtttttattctttattaagtttcgcagctgtcttttctccagcttggctcgttgctggaacttggcaagttacgattttagctggtttactactatcaccactatttttcgtgaaaatagaaacaaaatcaggtacgaaacttgtacgtggaaaaattccacttcgtagcttatatgttgcattatttattttacttggtgtaatttgtatgcaaacaactgccgcaggccatattacaatgactcagttcatttcaggttttttacctgtcgtattagccgctttcttatatccgttcggtaaccgaaaaatgatggagcttgttggtggacgccttgatacgttccaacgtgtattaggaatggcaattggaagtcttcctataacaatcttgcttggtatatacggattttctactactggcattccaacatccaaccaaatgcttcaaggatttctgttagcattatgttccggtgttattgcaacgatgacatttttctttgctactgacttagcaaaagataacctctctctacttggagctgttgaagcaacacaagctggaacgatggtctttaccgtgcttggtgaaatcattttcttaaatggttcactccctggaggactttctctcatcggaatgattattatcatgttaggaatggttgcaaatagtattttaaaccgttctgttccagtcgttaaacagaaaaaatcagcataaaaaaagagtatggttctatagagatgaaccatactcttttttattgtccccctatttcgccttatcagaatagtatttcattggctctttatactaaaacttatgttataatacgtttcatgcgcattaataggaggtaaattatgttaaaaaaagcaatcgctgaatttattggtacatttgtacttgtattattcggaactggagtagccgtcactggcggcggaattgaaggaattggaacattaggaatcgctatggctttcggtctatctattgtagctatggcatatagcatcggaacaatttctggatgtcacattaacccagcagtatcagtagctatgttcatcaacaaacgaatgaacgctatggaactttgttattatgtattagctcaaattttaggtggtttattaggaactgcaacgttagtaacaattttaaaatctgctaaaacacctttagataatttaggacaaaatggtttcggaactcttggtttatctggagcatttttagttgagttcattttaactttcgtatttattttagttatcgttgctgtaacaggtaaaaaaggaagttcttctttagctggactagtaattggtttcacattagttttaattcacttattaggaattccgttaactggaacatctgttaacccagctcgtagtatcgcaccagctttatttgttggtggagaagcactttctcaactatgggtattcatcgtagcaccaattcttggtggtatcttcgcagctatcgtaggtaaattcattttaaatactgaaaaatagaattttcaatatttctgaataaaaaaaggcgagccctcattatgaggaagctcgcttttttttattctttcattttagactttaaatttgtaactaattgatctaccgttacatttgcaagtacgttttccatcgcttcttgcgcttgcattaaaataatttctaatactgattgaatattagctcctactggacattcaatgttgggattttcatggaaggaaaatagctgtccttcttctacaacttccactgctttatatacatcaagtaatgtaatttcttctaaatctcgagcaagtgtcgtaccacctttaccagcttgtacatcaacaagtcctgctctcttcaacattcctgtaatgcgacgaatcacaactggatttgtattcacactaccggcaatccattcagaggtacagcgagagtttcgatctatcgcaagtaatgtcagcatatgaacacctactgtaaaacgactactaatccccatctgcacaccctcctttttattcattctattaaaagacgactcttatcattatatactatttttaatttatacataaagaaaaagcatgatttcaataggaaatcatgcttttctctcattattgacgctttataaatttcgctaaatctttaaatttcactttatctgagtaattcattacgccgtttacgtaaatgcggcttgtaacagcatttaataccgcaattgtcgccaataagactgctaatgttatcgtaatttctagcatacctgcttcaccagctacaatacgtgagaaggtaaccatcggtgtaaaaaagggaacgtaagaatttacaacgacgatagtactattcggatcacttaatgatttaatactaataaagaatgcagccataattaaaatcattaccgggaaagatacagcttgtaaatcctccgtcttagacacgacagctccagcagcagcatacatcatcgcataaagtaaatatcccgtaatgaaataaacaagaaacatgctgataacctttgcatctaatttcgtaaagtcaattggaataccaagtagtgaggcactttctaaatcgacccaacctaacaaatatggaataagataaccacacgccaatatgacaagttgcaataacgccgttgaaacaaccgctaaaattttcgcatacatcatcgtaagaggcttcactttcggaagcattacttccattacacgtgacgccttttcagatgcaatattcattgcgattgtatttccgaacgctacaataaacatatataaagcaaatgtaaagaaataggcaattccgaaagaagatgtacgatcttttatcgcttcttgctttacttgaatttctgtttgtaattgctgtgcaatttctggtgaaacattatttttggcaatcgtcaccatcgtatattgttgctttaaatatcctgccataattgcagaagttgcttggcttggaaatccattatacatatatgtaatcgatggagccccatccttttccgtcacatggaatagaccatctaaatcgccttcttctacttgcttatgcagtttatcaaaatcatcctttgaaccaattgttatttttgctgatggcaatagcttatttagctcatctttttgtactttatatgtggaactctctactacaactgcaattttatctttatccttatttttatcatcgcctgaagtaaaatgattaaatgcaaaaatcccaaacacaactaaaaataaaatcgcactcgtaattaatgattttttagataaaaatgcttccctaaaataaaatgaaaatacgtgagaaaatttacgcatcgttatttcgccctctctacaaagatttcgtttaacgtcggctctaacattttgaattgtcgtaagctaacaccttgctcttgcaactgttgcaaaatcttgagagcttccgcatcgtcttgtactttcacataaagaaggccttgttgtttttcatacgatacatgtatagcttctaatcccttttcattctctactgtatcttcaatcgttaaattacggaaaccgtattctttcttaatatcacttagctgtccttttacgactgcttcaccttttttcaaaatacatacatgttggcaaaaagcctctacttgttccatacgatgacttgataaaataatcgtctttccgctctgtacttgttcttcaataatactagctaacatcccagcattaactggatcaaggccgctgaatggttcatctaaaatgagaagttccggattatgaagaagagcagcaattaattggattttttgctgattcccttttgaaagctctccagccgttttaaatttatattctggtatcgctaaacgctctaaccagtgatcaatagcgtgatccacttctttcttcgacattccttctaatctaccaaaatatcgcagctgatctattactctactttttgtatataaacctctttcttctggtaaatacccaattgttacaccactatttccaaatgcttttccatcccatgtaatcgaaccttcattaggcgttaataatccgagaagcattttgattgttgttgttttccctgcaccatttcgtccaagtaaccctagtacttcaccttttggtaacgaaatttgcaaaccgttaactgcttttgattccccaaattgtttcgttaagttttgaatttgtaaactcaagtataaagcctcccctttagtatcattcgtactctctttcaaagactatgtttattcaagacaaaatatagcaccgcgcttcatcctcttatatgtaaacatcgtcattaatccatcatttgttctatttagttaaaattgtaaataacaaagttctttttgtcaattataattgtcattacgacaataaaaattgtcaaaacaactattattattttgctcatctttctaatataggacatactactatatatacaaaagacaatatgcaaatgttcatataaaaatattatattttaatatataatataaaatgattttctaacatcaaggaggatacatatgaagatgaagaggggcattaccactttattatctgtagcggttctatctacatcacttgtagcatgttcaggaacaccagagaaaacagtggcaaaagaagagaaagtaaaattaacagaacaacaattaatggctgatttatggtatcaaacagccggtgaaacgaaagcactttactaccaagggtacaacattggtcaattaaagcttgatacaattcttgcaaaagggacagagaaaaaacctgctatcgtgcttgatttagacgaaactgttttagataacagtcctcatcaagcaatgagcgtaaaaacaggcaaaggctatccttacaaatgggatgattggattaacaaagctgaggctgaagcccttccaggcgcaattgatttcttaaaatatacagagtctaaaggtgtagatatttactacatctcaaatcgtaaaacgaatcaactagatgcgacaattaaaaatcttgagcgtgtaggtgctcctcaagcaacgaaagaacatatattactacaagatccgaaagaaaaaggaaaagaaaaacgccgtgaactcgtttctcaaactcatgatattgtcttattcttcggtgataacttatctgatttcacaggttttgatggaaaatctgtaaaagatcgtaaccaaacagtagcagattcaaaagcacaatttggtgagaaattcattattttcccgaatccaatgtatggcgattgggaaggcgctttatatgattatgatttcaaaaaatcagatgcagaaaaagataaaatccgtcgcgacaacttaaaatcatttgaagtaaaataaaagaggatggcattcgccatcctcttttattttactttctctgttaaaggcaagataaatacttccacacgtctattctttgcctttccttcttgtgtatcgtttggagcaattgaacggtattctccgtatccaatcgcactaaatttttctggttgtaattctttattttgcagtaatacttgcataaaattaactgcccgctgcgtacttaattcccaattcgacgcaaactgcgcattggcaatagggacattatccgtatgacccgatactgtaatttcacgaggtgacgctgaaacaagtaagctagacatctcttttgcaatccctaaagattctaatttcacatctgctttccccgaatcaaacagtatattttctaatattgtcaccattaatcccttttcagttaatttagtttgaaaagaagaggataattgtttttcattaatatattgatcaatctttttttgtaatgctttcaattcatccatctcttttttttctttagctctagcttcttcttgtttttttgcttgttctgcctcaaggctacttgctgataattctttttcatcatttggcttttgatcacttaaaaattctttgttacctgttcccccagctaattcacttcgaaaagcaactgccatctgtttaaacttcgcagcatctatactactcattgcgaataaaacgataaacaatgcaaataacaacgttaacatatcagaatatgggattaaccacgtttcatcgatatgctcatcatgttttttctttttgcctcttctatttttcttactccgcatttttttctgctcctttttctagctttttacgctcagttgcagaaagtgcacctaaaatgcggttcttcataataaacggatatgtaccttcttgtaacattaataaacaatcaatgattaaacgttttttctcaatttcagctgaagatttttgctttaacttatttgcaaatggatgccataatacataacctgaaaaaataccaaaaatcgttgcaataaacgcacccgaaatagcatgacctaacttttcaatatcagttaagttaccaagcgcagctacaagaccgataacagcacctaaaactcctaatgtcggtgcatacgtaccagcttgtgaaaaaatagcagctccctttgcatgtctttcttcaattgcctctaattcagattccaaaatctgctccaaatcttctgcggatacgccatcaatcacaaatttcataccgcgcaaaagaaattcatcttgaattttgtctaattgttgctctaaagacaaaataccgtattttctactttcagatgtccaatgaacaaataattctagcaactgttcataacttaaatcctttttatttgaaccaaaaagaactttaaatagttttggaaccctttttagttgattcatcggaaatgcaatacatactgcagcaaatgtaccgataaaaataattaatgctgcggcaggatttaataaggctgttatgtcagcgcccttgacgaccatccctactaccactgctacaaatcctaaaataagtccaataattgttgcaaaatccattcccattcactcccagtctatacaagaagttctctattctcgataatcgctacatcttcttatgtatatatattacataaaaaatgcatttcatgaaagataagaaatgaattatataaaaaaatactacaaattcacacattttctgacattttctttgcatttctattacgttatgactcttatattccttttccaacaaactagatttataataaaaaaacattacacattttattaagaagggactgtgattacaaggcatcatgaaaaagataataattatttctgccactactattgtaatcgggatcacatctttcgcttactttggttctaaaacaccactacataatgaagcaaaagctgtcgaaagtcaaaagcataataaccataaaaaagaagagattcctgcttttccaaaagctgatcataatgcaaagaaaatagacaatgacttttcagtggtaacaaatcccaaatctaatcttgtcttaattaataaacatcgaaaactaccagatggatacattcctgaagacttaacgagaccaaatgtaccatttattagtccaaaagataaagaaaaaacattgctgcgaaaagatgctgcagaggcacttgaaaacatgtttaaagctgcgaaaaaagaagggcttgatcttacagctgtatctggttatcgttcatacaaacgccaaaaatcgttgcatgatacatacgttagacgccagggaaaagccgaagctaattcggtaagcgcaattcctggtacaagtgaacaccaaacgggtttagcaatggatattagttcaaaatcagctaaatttcaattagagcctatcttcggggagacagcagaaggaaaatgggtcgcagaacacgctcatgaattcggctttgtcattcgttacttagaagataaaacagatacaacagaatatgcatatgaaccatggcacttacgctacgttggtaatccatacgctacatacctatataaacatcacttaacattagaagaagcgatggaagacaaaaaataagagagcaaattgctctcttatttttctttcactctattattgtagtaatttcttcttccattcttcaggccatggttcgcctcttcctgtttttttcgacgcttgaaccatcattccacgacctactaaacaaacctctcctgctgcattcttcaccatataatgtaaatctaaagaagaattcccgaccgatcctgcctttacatacaccttcagctgttcatcaaaatatatttgcttaataaaattacattgtaaatccgcaacaacgatcatcgtttctgatgatgcatgtgtccactcttgcataaatccaagttctttaaacaacgcaatacgagcttcttcaaaataagtaaaagcaacgacattatttacatgtccaaacatatctacttcaccaaaacgaacctttacagggttgtaaaacgaaaaaccactttcccattgctcaaagtcttcaatataagaaatcctcttcattgttatctccccttttcacctttaaataaacagaataaacagaaaaataaagttataaatattgcctcttcgatatgaagaggcaatatttattaatagttattatcgctaccaaagaaatctttgaacgattgaattgttgtatcacggtttaatgccgcaattgaagttgttaaaggaatacccttcggacatgattgcacacagttttgagagttaccacagtttgctagtcctccatctcccataattgcacgtaagcgatctgctttatgcatttcacccgttggatgtgagttgaataagcgagcttgtgataacggtgctggtccaataaagtcagacttactgtttacgtttggacatgattctaagcaaacaccacatgtcatgcattttgaaagctcataagcccattgacgctttttctcaggcattcttggtcctggacctaggtcatacgtaccatcaattggaatccacgctttaacgcgttttagagcattaaacatgcgactacgatcaacttgcaagtcacgtacaaccgggaatgtcttcatcggttttaagcgaattggttgctctaattgatcgataagtgccgtacatgattgacgtggttttccgttaatcaccatcgaacatgcaccacatacttcctctaagcagttcatatcccatgcaatcggagttgtttggttcccttttgaatcaacaggattacgacggatttccataagtgctgagataatattcatattcggacgatatggaatttcaaactcttggtcaaacgcttgcgcatctggcccgtcttgtctcgtaatgatgaagcggattgttttctcagacatgttgtttatcccccttctcttcacccttagcagctacatcgtgttttgaagaataatcacgtttacgtggtttaattaacgaaatatcaacgtcctcgtaatggaatgctggtgcatttccttctccctcaaattttgccatcgtagtttttaagaagtttgcatcatcacgatttgggaattcaggtttgtaatgcgccccacggctctcattacggttatatgcgccaattgtaataacacgtgctaactcaaacatatttgcaagttggcgtgtaaatgaagcaccttggttactccatcttgctgtatcgttaatgttaatacgtttgtaacgagccattaattcttcaattttcgcatctgtttctaataattttttattttcacgaactactgtaacgttatctgtcatccattctccaagctctttatgaagaacatacgcattttcgttaccatccatcgttaaaatattgttaaatttctctgtttcgattaattcattttgctcatatacagtagatgaaacagcatcagatgatttagaaagacctttcatatactcaattgcgtttggtcctgctaccataccaccataaattgctgataatagtgagtttgcaccaagacggttaccaccgtgcatagaataatcacactcacctgctgcaaataaacctggaatatttgtcatctgtttataatcaacccatagtccgcccattgaatagtgaacagctgggaagattttcatcggtagtttacgaggatcatcccctgtaaatttctcatagatttcaataattccacctagtttaatatctagttcttttggatctttatgagaaagatctaagtacaccatgttttcaccgttaatacctagtttttgctctacgcaaacatcaaagatttcacgcgttgcgatgtcacgaggtacaaggtttccgtaagccggatatttttcttctaagaagtaccatggtttaccatctttatatgtccaaacacgtccaccttcaccacgtgcagattcactcataagacgtaatttatcgtctccaggaattgccgttgggtgaatttgaatgaactcaccgtttgcataatatgcgccttgttgatatacagcagaagctgctgtacctgtattgataatggagtttgttgattttccgaaaatgataccagggccccctgttgccataatcacggcatctgctccgaaacttctaatctccatagtttgtaagtcttgtgcaacgattcctcggcacacaccttcatcatcaacaacagctcgtaagaaatcccaaccttcatatttcgttacaagtcctgctacttcgtgacgacgtacttgctcatctaatgcgtaaagtaattgctgtccagttgttgcaccagcaaatgctgtacggtgatgttgcgttccaccaaatcgacggaaatcaagaagtccttcttccgtacggttgaacataacacccatacggtccattaaatgaatgataccaggtgctgcttcacacattgctttaactggtggttggttcgctaagaagtccccaccataaattgtatcgtcaaagtggatccatggagaatccccttcacctttcgtatttacggcaccgttaattccgccctgagcacatacagaatgtgaacgttttactggtactaaagaaaacagttcaacatttactcctgcttctgccgctttaatcgttgccattaagccagccaagccaccgccgactactataagtttccctttcatgctctcccactccttactggtttgctagctgtggatcgatgaacgctaataatgcactcacacctacataagataaacctaagaaaatagctaatgttacataagtagagattctttgtgaacgtggagatactgtaattccccagctgatgcagaatgtccatagtccatttgcaaagtggaaaattgttgaaacaacaccaactaagtagaatgcaaacatagctggattgtttaaaatatctgccatcatatcatagtttacctctttacctaacattgcttgaatacgagtttcccagacgtgccaagaaatgaagatcagcgtaacgatacctgaaattctttggaaaacgaacatccagttacggaaataaccgtaagaaaccgcattgttcttagctgtaaatgcaatatataagccatatatagcatggtacagtatcggtaaaaagatgatgaaaatttctagcgcataccggaatggaaggagctccataaagcctgcagctttgttaaaagcctctgctcctcgtgttgcaaagttgtttacaattaaatgttgcgtcaaaaagacaccaaccgggatgacccccattaatgagtgccacttacgaaacgtatactcgcggcctttcatgtccccattaccccccttgaatgtttgactgctgttttcagattagtttatgacaataatgttttttcactattggcataagaaaaactgaaaaaattattcgaaatatttcagcataatttgataccaagttcattttactcctatttttgtcgaagcgtcaagaaaacgtatacataatttgcatataatttgccaattctttttttcttcttatatattcagattttcctaaagaaaaatctgtttttataaatgtgaaatgttatataatactccctatagaaagaggggaatattgtgagtaaaaatacaatcgatacaacatctttagaagatgtttcattgaacgccttcgcttatgaattgctacgtgaagaattactacctgatttaatcggcaacgatttagatggtattttatactggtctggtagaaaccttgcaagaaaatatccgctagaaacaattgaagaagtcattcagttctttgaaaaggctggctggggcactttaagcattgttgaacataagcgtcgtgaaatgcagttccaacttaaaggcacactcatcgcagaacgtcaaaaacaaaaacgacattcttcttatcaactagaagccggattcatcgctgaacaaatccaaaagcaacggaacgtcgttgcagagtcatacgaagaaaagaaaaaacgttctgactctattacatttcttgtaaaatgggatataaaagatctcattgaagtgtaagcattacctacagtcaactagacatatcagtttagttgacttttttgtattttcattcagatgcatttattttaaatcttcagaaattataccaaaaaacagaagacgttgtaaactacaacgtcttcttatctgttaaatacgtataaatcgtctccgcgacatttttcggcatacccgcttcgacaaattcctctatagaagcttctttcatcttctttaatgaaccaaaatgttttaacaatacctttttccgtttatcaccgattcctggaatatcatccaatgctgattgaataacagatttcccgtgtaattgacgatggaatgtaatcgcaaatcgatgcacctcatcttgaatacgctgcaataaataaaattcttggctatttctctcaagcatcacaggttccggtggatccccaataattaaatgggaggttttatgtttatcatcttttacaagacctgccatcggaatatataatccgagctcattctctaaaatatcacttgcagccgctagatggccttttcctccatcaataataatcaaatcaggtaaaggtgaattttctttaagcgcccttgtataacggcgcctcacaacttctctcatagactcataatcatctggtccttgaaccgttttaattttatattttcgatactctttcttcgccggtttcccatcgataaaagcaatcattgcagaaacgggatttgttccttgaatatttgagttatcaaacgcttcaatacgatatggcgtttcaatcccaagctgcttccctaaatgatctaccgctttaatcgttcgttcttcatcacgttcaattaagtaaaacttctcttcaagagcaatcttcgcatttttatttgccaattctacaaggtcttttttcttaccacgtttcggctgcgtcgcttccacttctaaaaagcgctctactaattccgagtctatacttcctggaacgacaatttccttcggcttaaaatgactactgttttcataaaattggccgataaacgttaaaaaaccctcttctggttcatcgtaaattggaaacatagaaacatcacgttcaattagctttccttttcgaacgaagaaaacttgaacacacatccatcctttatccactgcatatccaaacacatcacgatccactaagtcactcataatcatcttttgcttttccataatcgcatcaatatgagcaatttgatcacgcaactcttttgcacgttcaaactctagtttctctgaggcctcatacatttttatttctagttctgaacgaacttctttatgtccaccatttaaaaacttaataatttcatctacaatttctttattttgttcttccgtcacttctttcacacaaggcgctaaacattgacccatatgataatacaaacaaactttatctggcatattcgtgcatttccgaagtggatacatacgatctagcagttttttcgtttcatgagcagattgtgcatttggataaggaccaaaatatttccctttatctttttttacgtttcgagtaatgagtaagcgaggttgcttctccgctgtaattttaataaaaggatatgttttatcatcttttaattgaatattatatttcggatcatattttttaattagatttaactctaaaataagtgcttctaaattcgaagaagttacaatatattcaaaatcaacaatttctcctacaagccgcagtgttttcccatcatgtgaaccagtaaagtacgagcgcacacgatttttaagcacttttgcctttccgacatatataaccgttccttgcttatctttcatcaaataacaaccaggttgatctggtaaaatagccaacttctctttcaaatgttcgtgcactcgtctccctccatttctacatacttagcatttttattttcccttgaaaacatactatgcccaaacacccaacatacgttcttttattgtaacggaaagactgtaaaaaagaaaataaaaaaagctaccaaatggtagctttttttattttagaagtgtttagaaactaattctactaacgcttctttcggtttgtaacctaacgcttgatcaactactttaccgtcttttaatacgaaaagagctggaatgctcattacttcgaattgacgagcagtttcttggttttcatcaacgtctacttttactacttttactttttcgcctagttctgcatcgatttcctctaatacaggagcgatcattttacaaggtccacaccaaggtgcccagaaatctaataatacaacaccttcgctagtttcagctgcgaagctttggtcatttgcgtttacaattgccattttatttcctccttcaagtatattctaccaagagtatatcattaacttatatacgtggcgaataatatgtatcgttatgtattgtaacaaaaaaatgttcctttatactatataaaaatacggattaaatactaaaaagatgagagacaggggatctctcacctttttctatatataggggtacttcacttggaactcaagggtactaaaatcatgaatgtacttttaactttttaaactcttctgttaaaagaggtacaacttcgaataagtcaccgacaataccgtagtcagctactttaaagatacttgcttctggatctttattaatcgcaacgattatttttgagttagacatacctgctaaatgctgaatcgcaccagaaataccacatgcaatgtataagtctggggtaacaactttaccagtttgaccaatttgtaatgagtaatcacagtattcagcgtcacaagcaccacgagatgccccaacagcgccgcctagtacgtcagccaactcttttaatggtttaaaaccttcttcactcttcacaccgcgtccaccagcgataataactttcgcttcagaaagatccacaccttctgccgttttacggacaacatcttgaatgattgtacgtaaatctttcacatcaactgtaatagaagatacgtcaccgctgcgagactcatctttttccagagttgcaatgttatttggacgcactgtcgcaaataagatgccgtctgttacaatcttcttctcgaatgctttaccagagtaaattggacgagtgaagataacatttccaccttcaacctctaaagcagttacgtcagaaattaaaccagcttcaagcttcgctgctaattttggtgataaatctttgccaagtgctgtatgtcccaagacaataccttctggattttcttcagcatgtacagctaaaaacgcttgtgcataaccatcagatgtatatgattttaatttatcattttcaactgtcacaacgcgatctgcaccgtaatgaatcaattcatttgcaaaagaggcaacgctgtctccaattagaagacctactacttcaccgccttctgcaattgtttttgctgctgctaccgcttcaaaagaaacgttacgtagcgatccatcacgaacttcacccattactaatactttacgagccatagattttccctcctgcatatataatttcgtattttattagattactttcgcttctgtatggagcaacgatacaagttcttttacttgatcttgcagctcgccttgtaacacttttcctgcatctttcttaggaggcaaatagatttcaattgtttttgtctttgcttccacatcatcttcttctaaatctaaatcatctaattctaattcttctagcggctttttcttcgctttcataatacctggaagcgatgggtaacgcggttcatttaaaccttgctgtgctgttactaaaactggtaatgaagttgcaatcacttctgtatcaccttcaacatcacgctcaatcttcacatttgtaccgtcaatttcaagttttgtaattgtcgttacatacggaatatttaacgcttcagctacgcgtggtcctacttgtccagatgcaccatcaattgcaacgtttccgcctaaaattaaatctgcatctttatcttttaaatattcagcaagcacttttgctgtcgtgaactggtcaccattttctacgtcatcttcaatattaattaatacagctttatcacagcccattgctaatgcagtacgaagttctttctcactatcttcgccaccgactgttacaactgtaacttctccaccttgtgcgtctcttacttgaattgcttcttcaattgcatattcatcgtaagggttgatgatgaattccgcttcgccatcgtaaattgcaccgtttttaattacgattttttcttctgtatcaaatgttcgtttcatgagtacgtagatgttcattccatttacccccttgtttttcagaaagattctatcaattttaattttctgttaatttatattaaaaaaataattgaactacctgccactaaatgaaggtttacgcttttctaaaaatgcagctacaccttctcttccatcttcactcgtaaatacttcaccaaaaatctgtgattcacgttgtacaccttcatagtaatgagacgattttgtcgtttgcaataactctagtacagcacgagttgttgctggactttttccagcaatttgttttgcaactttaagcgtatcatctaaaagagattcttcagagaacaatccgttaacaagtccccactttaatgcttctgcaccagtaattggtgtgcttgttaacatcatttcacaagctttcgctttcccaacataacgtggtaagcgctgtgtacctgcaaagccaggaattaatccaagtgttaattcaggtaaaccaagttttgcactttcagttgcaaagcgcatgtggcaagacatagcaaactcaaggccgccgcccagtgccgctccatgaattgccgcaataactggttttgaacatttttcaacacgctcaaacgtaacttgtccaagctgtgctaattctgttgcttgcttcgcttcagtaacagatgtaaattctttaatatctgctcccgctgagaagaaacgtccttcaccatgaataacaacaacacgaatgttatcatccttttccacttgatcaattaattcagtaacgtcatgcataacttgtgaagacatcgcattcgctggtgcgtgatttaacgtcgccaccgcgatatgatcttcaactcttacagataggaatttcaacatgatccctcccattattgacgataaccacaagctgcaataagtagcccgtgtaccgtttttgaaagtgcgaccagatcatacttatgatcgctcattacccaattggtcacaacttcatccactgttccaaagatcatttgtcttgccacgcgaacatttaaatctgcttgaaattcaccttgttttataccagtctctaaaatctcatccataacttgtaagtagccttttaatacttcatttattttaaggcgcaagtcttgattggactgcctcagctctaattgcgtaacgatagcaagaggatcattttgcgacaacagcaagaagtgcgtttctaccaacatgaataacttcgatacagcgctttcaattcctgctgttttttgacgaattgtttcgacaaattctcccatcttctcttggaataaggatattaatatatcttctttatttttaaaatataaataaatcgtgccatcagctaccccagcttgctttgcgattttagaaacttgcgcttggtggtacccattctccgcaatcacaatgactgccgcatcaataatttgattgtatttcggtctatttttcttcactttactgtccccttcaagaagatgactgaatgaatagtcattcatattcttataatactgactatttagaaaagtgtcaatcctattttttcaaaaagaaagggccttagcccgtttgctcatcctcattctttctcttctcttcatctattagaacacggcgcaaaattttccctactgtcgttttcggcaattcatctctaaactcatatactttcggcactttataagccgctaaatatttacgtgcaaactgatttaattcttcctcagagcactccgtaccttcttttaacacaacaaatgctttaactgtctctcctcggtacggatctggaactccaattgtcactacttcttgcactttttcatgctcatataatacttcttcaacttcacgaggatacacattaaatccactcgcgacaatcatatctttcttgcgatcttttacatagaaaaatccatcttcatccatgtagccaacatcacctgtatggagccagccatcttgcaatacagccgctgtttcctctggcttattccagtatcctttcataatttgaggacctttcactacaatttcccctatttctcctggcggtaatgcctcaccagtctcaagtgacataatgattgcttctgtatctggccacggaactccaatgctacctggcactcgcttttcccataaaaaattactatgtgtaactggagaggattctgttaaaccatatccctctactagtttaccacctgtaactgtttcgaacttttcctgtacttctactggcagtggtgctgatccactaatacaagcacgaatagaagaaatatcgtattcttttaaaagtgggctatttaaaagagcgatataaatagttggtgcccctggaaatagtgtcactttatgcttcttaatcgcttcaaaaaccattttcatatcaaactttggaataaggaccattttgtatccttgcataacactcaaattcataacagccgtcatgccgtacacgtggaaaaatggaagaaccccaagaacgacttcttctccttctttgcaattatataaccattgaactcccattaacgtgttagagacgaggtttttatgcgttaacataacgcctttcggaaatccggttgttcctcctgtgtactgtaaaagagctagatcattttcaggatcacaaggctcctcaacatccgtattcacttctttttctactgaattccaaagatgaatcgtttcactctctgatactttcacaactaaatttgactgttttttctgcacaaatggatacaatagatttttagggaatggtaaaaagtccgcaatacgagttacgataatatgctcaatttttgtagcagattgaacattcgttactcttggaaacactaaatcgagacaaagaattacttttgctcccgagtcatgaagctgatattctaattctctctctgtatacagtggatttgtttgtactacgatacctcccgcaagtaatgtgccgtaataaccaattacagcttgcggacaattcggcaacataatagcaactcgatcacccttttccacaccgagcttttgaagataatttgcaaacctcttcaccttatcatggaagtccgaaaacgtaatatccttccctaaaaagtgaagcgctttcttttctgggtagcgagaagccatctgttctacatatctatgaagcggctgaatatcataagaaatcgtactcggaatttcctctggataacttttcaaccatggtttttccaccttcattcccccttcaaatacataaaaataaatgaatgttcattcatgatggttattttcattatattatagtcaccatagcgttacaatcataatattctgacttttgtataactatgctttacttcattaacttcttattatatgtagaaactctcttaatcttaaaagagtaagagagttatagtttaacttaatcttattatcgttaacactgctcctggagtagttgttgataatgttgcgacagctaacaaaccaaataattgcaagctaatagcatctcctgctgcaagagttgtaatgattgttgcactaaatgatgtggttgctaccgcaggagcattaatcgtcccagcaagtgcccctccattaattgtaatccgtgaactgactaataatgaagccgttatattaattgtatatgaaatataataattaccagcatttgcaaccgtaaatactgtgtttccaccagaaacagtaattcctggaccgatgttttgattatttggaagcgggacattcgttccaccaagaactacagatatcgctgttcccgacgtattatttgcaaatgcatatgtcgccgtgatacttgtacctgttgctccggttggacctgttgaacccgttgatcccgttggacctgtcgctcccgtcggacctgttgatcctgttgaacccgttgatcccgttggacctgttgatcccgtcggacctgttgatcccgttgatcctgttggacctgttgaaccggttgaacccgttgatcccgttggacctgttgatcccgtcgatcctgttgaacctgttgctcccgttgatcctgttggacctgttgctcccgttggacctgttggacctgttgaaccggttgaacccgttgctcccgtcggacctgttgaacccgtcggacctgttgctcccgttggacctgttgctcccgttggacctgttgatcccgttggacctgttggacctgttggacctgttgaaccggttgaacccgttgctcccgttggacctgttgatcccgtcggacctgttgaacccgttggacctgttgatcccgtcggacctgttgatcccgtcggacctgttgctcctgttgaacccgttgctcctgttgctcccgttgctcccgtcggacctgttgaacctgtcgctccggttggacctgttgaacccgttgctcctgttgaacccgttgctcccgttggacctgttggaccaagcttagggactgtcccatcacaactaaaacaacacgaatcaacatgtacaccattttgattattacaactacaatatccatttgtattattgagccatgaagacatgttgattccttccttcaaattcaatcttataagtacaagtaagaaattaaaaaacatttatcaaatcagaccgaaagctttattcagtggagataaatatagatttatcccgtacattctaataattattacatgcgatactatctccttttgcttgtactttcgcctctctagttaaatgaaattccttttctaaattcttcatacacatatggattttaatcttacataacgatattcgtataattcgttatttttcagcaaaattttaaaaatataattacgaataaaaaacttattttgggaaagaagatgaagaaaattcttagtattttcatggttgttcttctattcgctgttgaatgcggacagcaaaaaagaggagaaaaaggtaacaacgatagaagataaaaagcaaactataacaattaaacatactgaaggggaaacaaaattagataaaccggcgaaaaaagttgctatacttggaacaccttatttcttatggttgatgaggaaaagtgggaagaaagttaattaaaagacggcttcatatatgtgaagccgtcttttcctattatggcagaaaattaatataggctttgtacataatatatataacaagtaaatacatgattatattgaatacacttcgttttaaagttaactttctctttaatttcttatcttgtaatctcaattctattccatttgctattttcaacctacctactatttgaaataactctctgtaatcatcagcatttcccaataatacgtattccttatcatttttatactttatatgcagaaactcgcttccacctttacggtctaatattgttttcatataagctacttcattcaatacacatacctttaaatcaacttcattataataacgatccataaaaaacacatacaaccgtttatttgtaacgattaacacattattaataccgaagttcattgcaagaacgcctacccctaatgtcatggctgtgcctgtctgccaatttttcacatgatgattttcggcaagcatactatataaaatctcttcgcttccctgtaactcttcttgtacaacctcataacaacgtttcattaaaattgttttggttacagtttcttttgtacgatctattttcgttttatctattttctcatcatttctataatcatctacaaaattatcgctatactgtaagttatttaattcctgaagtaacttttctttattcattgcttttcccccccaacagcttcttcaatttctttctccctcttgacagcctgctatataccgtatctcgtgtcataccgaattcaagcgctatttcttgtacgctatattcatctaaatacctttttataaaaattttcttatcttcttcattcaattctttaattaaaacgtaaaaattataatctctctcttcttttgttaaattgacattttttctatcttcatatctttcttgctgaaactcttgtaattgataagccttattactttttcgtttataatcaatggctttaaacttagcgacagatataagccagtttctaaacttcccacgattttcatcataactactaatgttgtaccaaacgattaataaaatatcgtcaacacattcatccactaacaccttactatgtgccgtatctaaaatactatgaactaccttataaattaaatctccatatcgatcaatcgctgtatgtaatgctaacatatcttgttttcgaagaccttctactatttctatatccttcacccttatcaccactctttatcccattctttattcattatatatacgaatgagcacattcgtttcctgacacttttacaaatattttctaattgttttcatattgtagcaatgcttaattaattatttcttgtggaacagggattatattatctctcacgaatttaatctatgaacaaaaataggagggataactatgtaccaaacaattgaaggctttttacaatcatggacatacgaggctgagtctactcagaaaatgcttgattcattaaccgatgcatctttatcacaggaaattgcacctgggcactggacgttaggaagaattgcttggcacatcgtgacggcagttcctgtgatactatctggcacagggctaaagtttgaaggagaaacgaaagattatcctgttccaacttctgcaaaaacaattgcagatgaataccgtaaagtaaacgcggcttttgttgaaacacttcaaagtaaatggactgataaagacttagctactattaatgacttctttggtcgccctatgccgaattctatatttttaatgacactcattaatcatcaaaatcaccaccgcggacaaatgacggttttaatgcgacaagctggcttaacagttcctggcgtatatggccccgcaaaagaagaatgggctgcggctggaatggaagctcctaaaatgtaacgacaaaaaagacaagatgtttacatatcttgtctttttctgtaacttgtttcatgtgaaactattttttcttaatagttgttttatggaaaagataggttaaaatgaatacatactatgaagaggagtaaccaaattgaatacaaagaataaaaaaatagctatgggcactattttattaacttctattattggagttattagtgtatctctttatttcacctattatggtaccccttggggaaaacaagcagcaattacggaatcaaaagaatatattacaaaatattttaatctagatgcagaagtcaaaaacacttcttacgatgctaaaatgaatagctatgcaatcgcctttgaaacaagtggagacggagagtttactatcgaatataaaagtcctaataactttaacatttctccaggagtgcaagagtatttaagtaaacactataaatttacagagtagtaccgaagcatacatatacaaaaaaagagttggtgtaacgccaactctttttttatttattcttgtcaaactgttatatcttccttctctatatttttaattccgtaatatgcaatcacagctccaattgctgcgagtgctagttgaaggggaagtaaagttgctgtaggaaactctgggttggtattcattgcaattgctacaacgataagagatgaaacaattgtagttggcactgaacgtttacgcattccgaaatataatgggattaaactcatccccgcagttgcaatggctaaaggaactagttttattccttcttgcaccaattgatctactgtgaatgaatgaggaagaattgaaaaacaactatctatcccaaagaaaattcctactactaaaatgttagatacaataactgttataaatgttactatcgctgtaatagccaacttactagccatcattttctttcgattaatgggataagaaaacatgagtagtattgttttatttttatattcgtcaattattaaccttgctattaatacactaccaaaaataataaatgttgctcttactactgtactagccattaacaaaatcatctgcggatctcttatttctggatctccttctatttgtgcaatgaaactaacaaagattaataatgccagtataataatatttgcaataactgctcccctcacataccatccaaacttaaatttcttcaattctaacttcataagacgtagcatgatattcctccttcctccttggacttaatcaatataaatgactcctgtttcacttaaaatcttcgcttcattttttgcatcaccaatcgttcctacttttattttgtctgtatttttatctttcttaagtccttttaaatccactattacgtcagccgaattacttttagccataagcttcaatgatgcagggacacctttataccgtacgccaatatcacctgattttgtttctataaataatgattttccttctgtcatatctttcagtaatacttccccagatgttgatgtgatgttcatatttgagttacttacatttgttatatagttatcaccagtcgtagactttatatttaattcttgtactgaactaccttttaaaactaactctccactttgcgatataaattcacctttctcggctgatagtcctgtaatcatttcatctccagacttgccttttgtcatgatattttttactactatatctcttattttcacatcacccgatttattatttactacaattttatctatttctttcttcggaatagctatagatatactatttttcttcctaaacgtgaaaccattaaaaaatctgttcatcttttgtttttgcttaatcacaattttattttcatcattttctattttgacaggatctatctctttatctgcttgttcaccttgagcgaaaattactattttattagcgtctgtacttttaaattcaagattccagttttcattatctacttctatttcttttatattatttatctcaaaagacttttctttcttaaaatctttcccctgaaataccttaataccaaaaactacactagcaattgtaatgaataatattgcaattactattatctttttcaccattcataccccagttcattgttgttttaagcttgcttcacaccacatcaatcttatcgattttacgatatgaaagataactgatgaaaattcctaataaacagagcactattgggatagctataaaattaaacagacttacttgaccgtttccaggaccaaagttactactaattagcattccgattattactgcagaagtaattgttgtgggtgtcgatttctttctcatcccaaaaaataaaggaattaaacttataccagatatcataaatgcacttataaaagtagttggaacgatagatattatttcacctatcgtagctggtgtttcaatcagtcccatcattggactcacaaaatatacaagcaaactgatactgaaagtagcgataatcgtgctcacaaaacaaaaacaaaaaacaattgttaatttcgccctcattagcattttcctttgcagcgggtacataaacgataattgcatcgttttgttcttatactcatcaattactaaacgtgataaaatgaccgaactaaaaataatgaatgttatcctaataaaagtgtttattaaaaccatttgttgcgtgaagtcaaagaagagcacgtctccctcggctttcattcccaacgccataaggcttactgcagcgaaaattgctataatacaaattgctacccctttaaagtaactagataatttatgtttcttccattcgagcttcattaatctaagcatacaaaccactcctccattctttatataactgtctttatgctgctaacattctaattccagcagtaacgaagcttaacattcctattactattagaattaacaaccatttccgctcaggttttctataatataaaatcccacttatgaacattacgatcaatccacttagtagattcactaacaatccattaagcatgaatgccctctccatccattacatttaagaaatattcttctaaggaactatgtttcttattaatactttcaatttccacatcgttcataataagtgcttttgaaatggcctgctgagacgctaacgtatcatacacacgaatcatggttccactcattattttgtagttttttataccaagtttatcttctaaaatataagctgcacgtttcacatcaggaacagtgatttcaatgtactctgtttgttttccgttaatactcttcattgaaacttcttttattagttttccattttgaatcacaccaattgtatcggccattagttccatttcacctaaaatatgactagaaactaataatgtaatgccatattctttgcagagcattttaaataagtctcgtaactctttaataccaattggatctaaaccgttaattggttcatctaaaatgagcaattctggctttgtcacgattgctcttgcaataccgagtcgttgtttcattcctaatgaaaaatcttttacttttttattatctaccccttgtagtttcactaaatgtaaagcatggtcaattgcatttttatcgtagtagcccatgtattcacaatgtaggtctaagttttctttcgccgttaatttatcataaaagattgggtattcaataattgtccccattctttttaatacttcataagatgtatctgttaatttctcaccgaagatttcaatatcaccactcgtcggttttattaaatttgtaatcattttcataatcgttgttttaccagcaccgtttggtcctaaaaaaccgtaaatttctccttttttcacatgcatgttaacaccggaaataacttctttccctttaaacaccttcgttaactggtttgtttttaatatatatgtcatgttactttcccctttcgcaatactctatatttctataatagacaacggaaatctcttttttcttacccgtttcttacaaattccttacgctgaaaaaaagcttgtagaatctactgctctacaagctaaaactgtatctttattaatgcaattgtaaaaattgttttttcatacggtttactagaaagatgaatttttccgtccatcgcttccacaagccgtttcgtaatcgttaatcctagaccgcttccttggtacaatctatttcttgaatcttcaagtgtgtacatacgctcaaacactttatcaatatgagattcatcaatcccttttcctttatcccatacatctatatacacgcccgtgtcatcatctcttaacgtcataccgagtgcctttccatcgtctccatatgtaattgcatttgatattaaattattcaataccctacctaatacttctacatttccaagtgcatatatatttctttctggtatatcaatatgaacctgaaaacctttcgtcgtcactaaatcataaaatgataaaatcttctcgcggcaaacttcattcatatttatttttgtcatttcaattgctttgtcaccagattctaatttcgctaaatcaaaaaacttatgaattaattccatcacttctagtgttttcgtatgcactttctcaagtaatatttgttgttcttctttatttatcgttttatccttatttaacatttctgtatatccaagaataactgttagtggtgttttcaagtcatgcgaaatatttgaaagcatttttctcatcgaaatttctacttttgcatgatctgcattcgttttctgttttgcatctaataattgattaatcgccactaataatttttgcaattctagatcatctgtcataacgagtaacgtctcacctgttttttcatttacaatactttctaacttttcatatgtgtatcgtaaatttttactactattttttctcattttatattgcatataaataacacataacaatataaaaataatacctattaacaaattgatcatattacatcacttccagcttatagccgatgccccatagcgttttaatatattctggattagatggatcactttcgattttctcacgcaatcttctcatatgaacattaataacgttatcgtcaccgtaatactcttcattccaaactaacgtatatatttgcgctttcgtaaatacacgattttggttctttacgaatagctttaaaatctcaaattcttttaaagtaagtttgagaggcttcccgtttttttctacagtaaaattaattggatcaattgttaaatcaccaatttgaatcattttttctattgtttctgtagccgagtatttcgtagacctccgaatacctgcttttacacgtgcagccaattcaatcatagaaaacggcttacaaatgtaatcatctgctccaagtcctaatccaacagctttatcaacatctgtatcttttgccgacatcattaaaatcggaactgcacttttttctcgaatgattcgtacaacctctaagccatctagctttggcatcataatgtcaaggataatcaaatcaaatgaaccttttaaatatgtgttcacgccttcttctccatcagacgcaatcgtaacttgaaagccttcctttattaaatacttttccaccatctcttgaattgagatatcatcttcaactaataaaatatgatgtgacatatgtctatcccctttttacaaacgttaacaatccaattgtatcgtaactactacagactggaaacaattatatgaattttcaaaccaacttcccttccttccttaacaatgatatgatgaaattcactacgattgttcataattaactttatataaaggagacttatcatgtcagaaaacaaaaaagtaagcttagctgatttaatgcgtgaacaacttgctaagaaaaagcaaggaaatggaaatggtcaaaatgcaaaaaatcaaagccaagaaacaaaaaaattacaaaaccaacaaacaaagaaaacaaacaaccaacgtagacgtacaggtgtataaatgaacggacaaaaacgttctaatatcgcccccggtcttgaagttgatattgtattaaaacaagatcaacgaacaggcaaattaacacgtggaattgtaaaagatattttaacaaactccccttcccatccgcatggcattaaagtgcgattgcaggacgggcaagtcggtagagtacaaaatatcgttcaataagaaaaggagctcaagtaaactcgagctccttttctttattaacctttaattttctcgatgaaaactacttttaagtagtctccttctttaaattgatcaatggtacggaaatcttctggtaaagaatgttcttctaatattttatatttgccattcatttctttaaaggctgtatcgataaagcctttaaactttttcatatcgaatgcgctacaatttgtagaagcaacgataataccgttattttctgtaatagcaattgtttcttttaataaatttttataatcttttgctgcactaaatgtatatttttttgagcgtgcaaagcttggagggtcaagtacgaccatatcaaatttcatttttttcttcgctgcatatttgaagtaaagaaatacatcttctacaataatatcttgcgcttcataatcaacttcatttacactaaactgctcaatcgttttacttaaactacgatttgcaaggtcaacactcgtcgttttactcgctccgccaagcgctgcaaatacagagaaagcacctgtataagagaacatatttaacactgttcttccttttgcatatttatcacgaatttgttttcgaacgttacgttgatctaaaaataccccaaccattgccccatcatttaaatacaccgcaaagtttacaccattttcttttacgataagtgggaactcgccgcgctctcctgctacgaaatcatccccctcaatatatttccctttcgtatcaaaacgctttttctcataaatacctttaaagtttgctactttttgaagagcggctataatctcatctctgaaagtataaatcccttcactataccaacttactacataatagccatcataataatcgataattagtcctccaagaccatcaccttcaccattcaccacacggaatgctgtcgtatcacttgatttgtaaaattgctttcgtttatgtaaggcagatttgattttactttcaaagaaagattgattaatttgttcactctcttttctcgttaaaatccagccgtaccctttattttgttttccataatagccttttccgataaattggttcttctcatctactactttaatgattgttccttcttcacgaacatcatttaaattttgaatcgcatcttttaaaataagcggatatccacttttaatttcttttataaatttcggttttatttttacagttacttctgatcgcatataataacttcctttccatttgcatgctttctctacaggaagcatttaaaaaacgagactgaaaaaacagcctcgtttcactataccatattattgctttgctagtacaactcgctcattctctcgcttaactgccacatatttactacattttgaactggaaatcttactgtccaatataatataaaaaacttttatatttcacatttagcattgacaatgataatgattttcattatcatttaatgtatatgagttctcgaaaataaaggctatatttataggaggaataaacatgattatcgttacaaatacagctaaaattacaaagggaaatggatataaattaattgagcgttttaataaagtaggtaaagttgaaacgatgccaggctttttaggtctagaagttcttttaacgcaaaatacagttgattatgatgaagtaacaattagcactcgctggaatgcaaaagaagatttccaaggttggacaaagagcgctgcatttaaagatgctcactcacatcaaggcggaatgccagaatatattcttgataataaaattgcttactatgatgtaaaagttgtacgtatgccaatggctgcagcacagtaaaaacagtccttttttaaagtatagaatatgagaagcgttatctatcacttctcatattctatacttttttctttaatttctttttattaattttgcgtgtacaactagccttccagcctctggatcaagcgcatagtcacaagtagaaagtgttacgatttcatcattagccgtcaattccgtatccgttttgtacagtgatttttcttgaatttcctttaagaacgatgtatatgctgcatcattttcaaaatccgtttcaatgtaataaaagtccgttgttgtcgtgtatactgaaaaaacttccacgtcgtatccttcaaataatgtatcgtaatataatttacgatgagacataaaaaagtcttcatccaacatcttttttaaactaccaaacatagaaccgtctttcatacgatggccatataaaatcgtatttcgattttgagatttcacatcattacgatggtccataaaaatgcttcccgctctcatatcttcacctttataattacgaaataaatagtaatcattatcttttgcttgaacgattggataattaatttgtgtatcatccatcgtaatccatccgactatctctggattaattttctggagatcctgaaactgtttacgtacctctccatcttctgatttttcttccattggacttcttttataaatatgttgtgcctcagccattactttacgattttcataataatccatgaaaatcccgcccaactcatacattgaatagaaaaagattcctaaaaacacaattgtaagtatgcgttgaaaaaaagaattctttttccgtcctttcttactattcaaattatcacctcaaaacggattatgctcagcctttagattcccataggtaccatgtacaatccggtatcttcatcctgctttacaatgacatctacaccatatattgctttaatcatttcttctgttattacatcattaggattacctttcgtaatgatttctccatctttcataacgataatatggtcgctataacgaatggcttgattaatatcatgtaataccattacaatcgttagtccatgcacttcatttaactctttcactaactctaatatttctagctgatagtaaatatctaaatatgtggtcggctcatctaagaagagcattggtgtattttgagctaatgtcattgcgatccaaactcgctgcctctctccaccagataaagcataaattggcttatcacgcttactttgtaaattcgtacatactagcgcacgctcaatcgcttctctatcttcatctgtttgcggagagaatatatttttatatggcatacgcccgaagcttattagcttttccactgtaatatctgctggagcctcattttgttgatggacaaccgctagttttctagcaaactctttcggtttatattcactaatcgctttcccatcaagtattacttctccactgctaggagcgtggtttctagacatgacactaagtaatgttgatttcccacatccattcggtccaatgattgttgtaattttcccaatttctatttcactactaacagactttaatcgatttgttacgttatcgtatgaaaaggttacatttttaatttccatgaactttatcactctttccaagcaagaatattaagaatggaccaccaataaccgccataattgttgctgctggaatttcgttaggtggcacaattaaccttccaatcgtatctgccgtcaaaattaataacgcccctgcaagagcagaaaatggaattaatactttatggtctgaaccgactaattgtcttgaaatatgcggaactagtaatcctacaaaagcaataacacctgcaatcgctgttgatactgccgctaagagtactgcaatggcagaaataataagacgaactctcgtcacgtgcaagcctaagtttttcgcagtcttatcttgtagcgataataagttacaccaagctcctacgaacagagcaagaataagaccaatcgttccataagtcaccattatttctacatcgccccacgtcttcattgttatgttagaagtcgtcgtttgcttaatactcttaataaaatatccacaaatcgtaacgaatgattcatttaatccagtaaacattgcattaatggcaataccaattaaaataatgcgaagcgggcttaatcctgatttccatgaaaacgaataaacgagataacatgcaagcgcaccacctaaaaaggcgaatacgggtgtccagaaaaagaattgcgggaacaacgtaataataacgagtgtcataaaacttgctcctgaagatataccgattaccccagcatcagcgagtggatttttcataacagcttgaaaaagcacacctgaaacagcgagagccgctccagtgaacaacgcaataataatacgcggaaaacgtaaatctttaatgacttcaacatcttcatttccacctgtaaatatcccttgtacaagttcaacaatacctacttctaaactacctttcatcgctgacaatgatgtcataacaataagcaatgcagtaacaatgaggaaactccaagtttttttattcattctactcttcctttatattaaaatgcatcacggatacatcatttttttcaattcatctaatgcttcaattgctgctaaattacctgtcgttccaaataaacgctcttctaaatcgtaaacacggttatttttaaccgcagcaaagtgtttccaaatatcatttgttttaaattctttatcaaacatttttacaacttcatcaggcataccatgagctgctcgtaaaataatatctggatcagctttctttaaatactctgtattagaagctaaatattctacttgttcaccttgcacaatatttttaccacctagttgtttcactaaatctccaatataagaatgctctgttgctactaaataacttcccggcacacctaataaaataagcactgtcggttctttctttccttttacttctttttgaatgctagcaacctttttatctaatttagttactactgcttcggcctgtttttcacgcccatatttcttacctaaatcgctaatagaactttgcatatttttcaaactcgttaaatctaaaaagtttgctttcatacccacaccatcaaaaactggctttaattcatattcaagtgttgtcacagataacacttctgaaggctttaatgactttaccttttccatatctggactcattggattcccaacttcaggtaaacctttatatcgcttcggtaaagttttagaacttgttggaacgccgactaaatctacttctaacgcatccataatttcagtaacagccactgttgttgcaacaacgtgctctttactttcactctttacctgctttgctgattctttttttggtgatgagcacccggctatacccattaacaaaatgatagccattagtacacttgcaattttcttcactctcaatcaccactcctttccatacaatatgaaacaagtcttgatgcacgcgaacatgcatcaagactccaaaaattacaatctacctgctctatatttacgaactagtaaagcaagtgaacctagcagtaacaccatgtataaaccaagttgtgctgtatctgcagtttttgagtttttctctttttttgaatcattttttgtatcttcttttttcttctgaccatctgcatttcggttaaaatcaggagtacctactgtttttacattatctactttcggtgtagtcactggatttttcggttcatttttcggttcctctttaatagttcctaacgcgccgatattatttgtatcaaattgaatttgtacatcgtagaaatgatggtagttcatctcatcgatgtctacctttacttttgcgtttaattttttaaatagatcttctacttcaaactgtactactcgcgtatttgcatttttatcttcgcttactactttcgcatcagcgaatagttcattgttttccgcttggaatttcgtaatccacgcactatttttcagcgtcatctcaatatattttttaccatcttttacgattaatttcgctggatttacaacatagtcatgcatctttgaaatctcatctgttttatcttttaatactttaaatgtaatatcatattggccatctactaaatttttcgaatcaactattactctcggtttattattttcatcttggttgttgtttccaccttggttgtcgtttccgccttggttgtcgtttccgccttggttgtcgtttccgccttggttgtcgtttccgccttggttgtcgtttccgccttggttgtcgtttccgccttggttgtcgtttccgccttggttgttgtttccgccttggttgtcgtttccgccttggttgttgtttccgccttggctatctaacggcttaatgctacctttatcaaatgcaaattgaatatcgtaaaaatggtgataattcattgaatcgatatctacttttacttttgcatttaacttttttgataaatctggtacttctacttccactacgcgtgtatcagcttttttatcttcacttattacatgtgcatcaacaaacgaaccatttttctcaaattcaaattttgtaatccaagaactgttcgttaacgtaaatgatacatacttcttaccatcttttacttttagcacacctggactttttgtatatgtgttcatcattgaaatttcgtctgtttgatcttttaatgctttgaaattgatgctgtattcaccatctttaattgtttcagcatctggttttttattttcatctggtttttctacttccggtttttctgcttccggtttttctgcttctggttgtttctcttcatttttaatttgttcaagtttatcttgttcaaataaaagttgtacatcatgcgtttgcttataatttcttgatgccatttcgataaatacttttgtatttagttttttagataaatcgtttacttcaaactctactactcttgtatctttttccttatcctcactcactacttttgcatcaacaaatgcgccatctttttccgtttggaaatttttaattaatgagctactttttagtgttacaattgcttttttcttaccgttttctacttttaatactcctggatttaccatgtaagtattcatcttagattcttcatctgtttgatcttttaatactttaaatggaatgctgtacgtaccatctgtaattgtgttagaatttggttgttgatctgggtcaggcttttggtcgggcttctgacctggatcggtagtttcatttggatctggcttattagctgggtcctctttttcatttggtttttctacatgaattggtgtaatgctattttgatcaaatgcaatacgaacgtcgtactcatgatgataatttaaaaaatcaatatctacttttacttttgcatttaataccttctctatatcttctacatcaaattctactactcttgtatctttttctttatcttcactaattacatttgtcgcaactagcttacctgctttttctgtttcaaacttcgtaatccatgaactattcgttaatgtaaaggatactttctttttcccatccttcacttttaaagttcccggacttactgaatattgattcatcattgattcttcatctgatgtatcttttaaaactttgaacccaattgaatattcaccgtcagccaacttggtagctgcttgaactgcaagtggttgtaatgttgatacgaatgtaaatatcattaaaaacatagcaacaataatttttgtatacctgttcaatggaacgactctcccttttgaaaattatttaatactgctcccatcaaatacaaagcgaatatcatatgaagcattataattaataattggaatattaatttccacctttccatttagtttttttgacaagtcagcaacttcaaattctactactctagtattatcttttttgttttcacttaacacgtttgtttctacaaattgaccatctttttctacttggaaacttttaatagaagcactatctttcactttaaatgaaacatattgttttccatttttaactgttaatgttgctgggctttcaaaataactattcattctagacgattcatctttatcgcctttccatacagtaaaagcaatattatattttccatcagctagttttgtagcagcctttgcatcttgtaaacctagtgttgcgataaacgtaaataaaacagcaaatacagcaataatcattttaaattgtttaaacatatattcatcccccttcaaaagatttatttactcaacttcactttacgaattaagaaagcacctgaaataagaattaacgctacaaacaatccaatacgtgcttcatcgcctgtttttgggttatctgttttttcagcttttccattttcattttttgtttctttgttcacttctttagctgtttccttactctctacttttgttttctcttcttttacttgtgtatctgttttcgcttgatcattattttttgttgtagcagctacgccgttatcgccacctacagcttttacatttgcatcaaaagcaaaacgaattgtgtagtggtggtcatagtttgcatttggtacaacaacatgaatttttacagctgccggtttggataaatcatctactttaaactctactgttcttttatctgccgattcatctttactaacaactttcgcatcaacaaaatccccattctctggtgctttaaattctgtaatccaagcactatgattcatcggaacttgtactctcatctcaccgtttttcactattaattttgccggcttttcaaaatagtcatttgccattgaagctgaatcattttccgctttttgaattacgtaattaatatcgtaagtaccatcagctagttttgctgaagcattcccgtatggcattacaagaaaagctagcatacatacgaacgttataataaaagcgggtaatacagaaacctttttcatttttcttgtttcctccttggttatctttcatttcactttttgaaaatgataattattctcaatttataagaaaaaaaataatctcttctacctattatttaattagcattcttttatgtaacataagtattattgattatcattctcattgaatattaaaaataatatctcaccctattccttatacgaaggcatagaaactgagaaaaaatgataaaacgcatttattgattatcattctcaatgtaaatcaaaaaaaaataaactatctcttctcctcttctttcacctcttcccacaacaacactatagttatagaaaccccttttccctcacttcccttccaatatttccacaactaagtcaatcttagcctactcataaattttttgtcaactatattacgtataaaatttttaatatctgaatttctctatatacggctttttttacaaaaaaagagactttctataatagaaagcctcttttctctatttttctacagcaatttcctgcttttgaaacttagaaactatataaccaaatcctataccgattatgcctggaactaaccaaccaattcctacactatataatggaatcttatctaaaataggtgctagcgctgcaatttgaaggtttgcattgtgtaatccatcaaagaaacttattgcaaatgctcctacaatcccgcccacatacatcgctaatggaagacgaacgtagttttcaacaagtgataatacgataagtacgattccaattggataaattgcgattaagattggtaatgctaatgcatttaactgagttaacccaaggtttgctaccataaatgctaatacacagaaaatgaaaacgactttttgataagaaagctttggtaataaggaagagaagtaatcaccacaagctgcaacaatacctacagaagttgttaaacatgctgctgtaattgcgatccctagtaataaagttccgtagctaccaaataaatgattcacgacatttgttaaaataattcctccgtttgcgcccattccaagtgacacactagaagctccaagataagcaagtgctaaatacacaagtagtagaccaagtgctgcaataaatcctgcaaagattgttacttttgcaatactgtttttatttgtaattcctttttcttttaacgcatgaattacaacatttccgaataccagtgctgcaagtccatctaaagttaaatatccatcaataaatcctttaaagagaggagcactatacgcttctgtcggtgcaccaaattctccaattggtgtaataagtgctttacctacgataattgcaataacagctaataatattggagttagcaccttaccaatacgacccactaatttcgaaggatttaaagctaaatagaaagtgactgcaaagaaaataagtgtaaagataacaagtggatatgactgaccagctatctcacttggtaaaaacggtgcaacactcatctcataagctactgttcctgtacgcggtacacttacgaatacgcctaaacataaataaattgcagtgataaaaacaagtgcgaatataggatgtacacgtcctgctagctcattaatatctccctttaaagctataacaattactcctaataaaggtagtccaacgcctgttacgataaaaccaaacagcgcgatccatacgtccgttccagcaccttgccctaacgctggtggaaaaatcatattacctgcaccaaaaaacagtgcaaataacattaaacttattgcaaacatctccgaaaactttaaagatgatttcattcctactaacctcctaaaataattaattaacaaaatattctgaattaaaatccgtcacatatcctctttcaagcatacttccccgtaaaagaacgcaaaaaacacccgtccctaacaaagggacgagtgttgaaatcgtggttccacccttattctaataaaatgaattcataacgaaataagctcattttatagctcgtgtaaattgataacggttttatccgccaagaattacaatgcatcatgtatgcagttcactcttgaagtttagaggtggtaagcttgtcttttcgtattaggaagctcacagcctaaggcttccctctctgagaatcgtaaaatacaactcatgtcctcatcattacttttataaaatatcttgtcgaaacttgttgttttttattatatgggctattttttaaaaaatcaatagttttattttttctgacaaaaaaatatagggagaaaattttccctccctataactgccctattaaaatttctaactcttcagctgtaacgctccgccactttccaacttcaagctcatttagctctatattcataatgcgtactcgctttagctttattacagtaaatccgaaagcacgactcattctacgaatttgcctgttcattccttgcgttaaaacgatacgaaatgttgattgatcgactcttgtcactttgcacggcttcgtcattccatctttaatctttacaccgctggacatctcattaataaaccagtccgtaaaaggtttatcgactgtgacaacatattccttctcgtgctcatgatcaccatgtaaaattcgattcgcaatgccgccgtcattcgttaataagataagtccttccgatactttatctaatcgtccaactggaaagattcgctctggataattgatataatcaataatattatcttcaatatgatcagctgctgtacaagtaattccgactggtttatgaaaggctatgtacaccttttctttctcttcttttacaataacttgcccatcaatcgttacaacatcaccatcgctcacaagttcaccgtgcgtacatatttcaccattaatagccacgcgtccagctttaatgaggcgatctgtttcacgtctggagcatgattttgcttcgcttatgtattggttgattttcatgttctattccttttcacatatattaaaagcgtcaatctatggcaatatcattctgccacgattgacgctttttcacttcgcaaaaacaactaaataaataaccccaatcaccaaaaatattccgcaacaagctaacaatacttttgcaagtttgtccataaacatataatggtttcccctttgtttcgttgttttctattttaattcgacaactgttacgcctaggcctccctcgcccatgtcaccgtaacggaaggtttttacaccgcgatgcttcttcaagtaatcttgtacaccttggcgaagtgctcctgtccctttaccgtgaataattgatacgcgaggatagcttgcaagctgggcatcgtctaagtatttctcaacgcgcgccattgcattttcaaatcgctcaccacgaaggtcaagttctaatgaaacgtgatagtctctaccttttaccgttgcaactgcttttttctctgtttgcttcggtgtgttaatgtattccatgttagattcttttactttcatcttcagaataccgatttgtacgctccactcagtatcgcttactttttcaagtaattgacctttttgaccgaacgttaatacttttacttcatcacctgcacgtaactgttgtttcggcgcagtgtttttcacgtttactttttgtttcttaacaagctctggtgctgcgccttctagacggctcttcgcttcaattaactcgtggtctttcacgtttgcaagctgtgctttacgcaattgacgaagttcttgaataatgccttctgcttctttctttgcagcttcgactttttcttccccttctttttgcgcttttaataatcgttcatcgcgatcttcgttaaattcaataatttgacgttgtaattcacgatgaagtttttcagattgtttgcgaagtgcttctgcttcgttccagtcacgctctgcgttcttctggctttcttctaacttcgcaatcatattttcaattttattcgtatctgtactaatgtggttgcgtgcttggtcaataacgcgatcagataatccaagacgtttcgaaatttcaaaggcattactacggcctggtacaccgattaataatttataagttggacttaatgtatttacatcaaactcaacactcgcattaataacttgctcacggttatatccgtatgcttttaattctggataatgcgtcgttgcaacaacgcgagcaccgcgattacatacttcatctaaaatcgaaattgctagtgcagccccttcttgtgggtctgttccagcacctaattcatcgaataaaactaagctttcaaaatcagctttttctaaaatatcaacgatgttcaccatatgtgaggagaacgtacttaaactttgttcaatcgattgctcatcaccgatatcagcaaatatatttttaaacacacaaatctctgactcatccattactggaatgtgaagaccagattgcgccattaaaacacaaataccaactgttttcagcgtaactgttttaccacctgtattcggtcctgtaataacaattgtcgtgaaatctttacctaacataatgttatttggcacaataatttctggatcgattagcggatggcgagcttgtcttaaatccatataacgctcgttatttacgattggtttcgttgctttaattcgctttgcataaaaagctttcgcaaaaatgaaatcaagattcgcaactacttctacgtttgataaaacgatatcggcttctactgccacttcttctgttaacatcaataagatgcgttcgatttcttgtttctctttcacacgagcttcttgcagtgcgttatttaattctacaatgacttgcggttcaataaataacgtttgtccagaagctgattgatcgtgaacaataccaccatatacgccgcggtattcttgttttactgggattacgtaacgttcgttacgaatcgttacaatcgagtcagacagcatcttttgcgcatttgaagagcgcgtcatattttctaatttttcacgaatacggctttccgcagtacgaatttgagtacgaataccacgcagtttatcacttgcgctatcgactacttcaccgccgtcaccgatacaatttgtaattttcttttctaaatcatataaagatacaatttgagcgacgtgagtttctaaaatcggaagctcgacaccgttatcagccatatcttcaatgaaacgtttcatattacgactaccatacatcgtattcgcaatatcaagtaattcatttggacttaacatactcccaatttttgcacgcttcacatttgagcgaatatccgtaataccacctaatggtgcactaccttttaaacgaataactttcgctgcttcatccgttgtatcttgcatttctacaatttcttcaaaatcagtgctcggcactaaatgcttcactttgtcacggccaagtgaagaggctgtatgttcaagtaattgttcttttactttattgtattctaatacacgcaacgttctttctaacatgttgcaggtcccccttgcgttacttattacgtttaatatagtctaataaacgttcaatatcccatgtgttaatcacgttatctttttgaatccaacctttacgtgctgctgctacacctgtttccatatcttctaacatttcaagtgtatgagcatctgtattaatcgctacttttacaccagcatcttgtgcttgttttaataatttagcgcttaaatctagacggttcggattcgcatttaattctaaaactgtatttgtctcttttgcgagttcaattaataaatctgtatctacatcataaccctcacggcgcccgagaagacgtcctgtcggatgagcaatcattgtgacatgtttattctcaagtgcagtacgcagacgcttcatgatcgtttcacggtcttgtgagaagctagagtgaatcgctccaataacatagtctaattcttctaatacttcatcatcaaaatcaagcgaggcatctggtaaaatgtccatttcaattccgcgtaaaattgtaatgtctggatacttttcattcatacgttcaatttctttcgcttgctcacgaagacgctctttcgttaaaccattcgctacttttaagtattgcgagtgatcagtaatcgccataaacttatatccacgagcacggcacgcttgtaccatttcttcaatagaaaaagcaccgtcactccaagttgtatgcatatgtaaatcaccttgtatatcggaaaactgaattaagttcggatactctttaattaattcaatttcttttccatcttcacgcacttctggcggaataaatggtagaccgaaatgagcaaagaagtcttcttcagtctcaaatgttttcacttcacctgtttctaagttctctacaccgtactcactaattttctcgcctttatcttttgcgatttgacgcatttttacgttatggtcttttgatcctgtgaaatggtgaagtgttgtaataaactcttctggttttactaagcggaaatcgattgaaatatcatattcatattgaagacgaacagaaactttcgtatccccacttgcgattacctcaatcatattatcgaattgtagtaaatgctcacgtaccgttgctggttctgtcgttgcaatgataaaatctaaatctttcactgtttcacgaacacggcgcaaactaccagcgcgagagaaacgaattacttcagcaatattcgacaatttctcctctatttccccggcaataggcaataccatcgcaattggtaaacgctctggacgagagcctacttgatcgattgcttctaatattttctcttctgtcttcttaccgaaaccagctaaagcttgtactttattttcctcacaagcagcttttaacgtctccatatcaataacgcctagctctttatataacttagccacctttttaccaccaagacctggtagttttaataacggcaataagctactcggtacttctttttcaagttcttgtaatacttcagatgttcccgattctatatattcttgaataacggctgctgttccttttccgatgcccggaatctttgtgaaatcttcaatctcagaaagactacgatcgtcactttctaatgctgctgccgctttacgaaatgcagatattttaaatggattcgcaccctttagttccataaaaagcccgattgtctctaataatttgataacttgttttttatttactttcatcattaccccgcctttctttcatagaaaaaaacttctctttccgaaaaaagagaagttatactctgctacctgtctgccatagttccttcaccttttcagatagaatcggtgtatcgtctacaattattttgctaattgatgatttttgtaatggtgtttgtacttgttcaatcggaagaatgtttccaatgataattaagacaaacaaaacaatatatacttctaaaaatccgaggattgcccccgcaaacgcatttacttgctttaaaaccggtatttctgcaaacatatttaacaaattaccaagtaatgaaagtgctatttttgtaataataaacaatatgataaacgcaagcgcttgataaaatactgtctcaatattatttgcatcaatccattctggaacagatacgtttttatcaaatggatacggaataaatttcgcaagtgctggcgctaaatctttacagtaccagtatgcaacaaggtatgcgataataaagcttgttaactttacaagttgcagaataaaccctctgcgtaagccgaggaaaaatcccataacaagcagtaaaatgataataatatcaatcatgttattccattcctttttttgtcatactttctttcaatttctcatgttcttcttttaattttatgtaatcgtgtatgacgtttaccgccgtcaataccgctagtctactcgtgtcaagcgaaggattcttggcattgagttcgcgcattttatcatccacaatcgctgctaccatgcggatatgacttgtactttcatcgccaacaactgaatattgctgaccatagatttctacattaattcgacttttctttcccttttgttgtgacaactcaccggcctccaatcacgtacagaatcctaaagtttatcataccatgaaccttcataatatggaaacagaaagaacaatccgatatgataaaaataacaatataaaaaaaggggcgaccattatgtcaaattctatcgtaattcaaacaaattctacagtaattgaagacatgaaacaacaatataaacattcacttagcccgaaaattccgcaaggcggtatctttatggctaaggtgccatcttgcacgattacagcgtataaatctggaaaagtaatgttccaaggaggccgcgctgaagcagaagcttctcgttggcaaactgtctctcacgcgccgaaaacagctgtaaaaaaatctgtcgattcccatcgttatgcgccgcctacttccatcagtacaatgtctattgtagggtctgatgaagttggtacgggagatttctttggaccgatgacagtcgttgctgtatatgtggatgcgaagcaaattccactactaaaagaacttggtgtaaaagactctaaaaacttaaatgacgatcaaattattgccattgcgaaacaacttctacacgttgttccttatagctctcttgtccttcataatgaaaaatataacgagctatttgataaaggaaacaaccaaggtaagttaaaagccttgctacataataaagctattacaaacttattagcgaaaatggcacctacaaaacctgaaggcgtcttaatcgaccaattcacacaacctgatacatactacaaatatttagcaaaacaaaaacaggtacagcgtgaaaatgtttattttgctacgaaaggtgaaagcgtccatttagcagtagccgctgcttctattttagctcgctactcattcgtaaaacagtttgacgaactaagtaaaaaagctggtatgccacttccgaaaggtgctggtaaacaagttgatatcgctgctgctaaattaattcaaaagcttggtaaagaacgattacccgagtttgtgaaactgcatttcgctaatacggagaaggcgcttcgcttattaaaatagtatcgacaaaaacaggagcctacaaactcctgttttttgtttcatcctactattgtccttatagttttgttataattataatatacagattattctaacataggaggagatctacattgctacttctacaaatgattctaaatattttactaggcgatccacacgaaagacagttcgaaattagagaaaacattcagctactaagtggacaaccagcgttcaacgatttaatagaacgttatggtcgatctttcttattaaactttcggattcgaagatttatcgggaaacacgatgcacgcttgttaatacataatccagcaaaactacaacacttctgtgaagaacttgaatgtatgattagaaaaaggaggtttttcatatgaacgctgtaaaagttaaaaaggtacgatatgctttcgtacacctcgtaggtccactttcttacctcactatttctatcatttggggagcttttttcactactaaatccacattcgaaaatatatatgataatcttggcgtgatggccatctattacgtgttcatgagtttactgtggtttttctatttagatcgattagacaaagacataaataagattacaaaagaaattaacgataataagatgtaacacataacaaaggagagcccttaagactctcctttgttatgttagcttcgtttctgcttcttatttgatgaagatactttatgagaacctgtttcatgtgtcgtcgttccttgtccttcaacttctggagaacctaggcccgatcttgaatgatcttttttcacttttttactcatttatattcaccccttcgcgttactttttgctacgagggaataaactatacaatatgtaaaataaaaagcgagaggaaatcctctcgccttttttcatattttagaattcagaagaacctggagttcttgggaatggaattacgtcacggatgttagccataccagtgatgtacattaggaagcgctcgaaacctagaccgaatccagcgtgttttgtaccgccgtattttctaagttctaagtaccaccagtagtcctcttcgttcatacctaattctttaattctgtctactaaaacgtccattctttcttcacgttggcttccgccgattaattcgccgatgccaggaactagaaggtcagtagcagctactgttttaccgtcttcatttaaacgcatgtagaatgctttaatgtctttcggatagtcagttacgaatacagggcgtttgaagatttcttctgataagtatctttcgtgctctgtttgtaagtcaattccccattctactgggtatttgaagtcagcacctgattcttgaagcactttaattgcttctgtataagtgatgcgaccgaagtcagagttaattacgttgttcatgcgctcaagaactgttttatcaacgaagctgttgaagaattccatttcttctggtgcatgctctaatacgtatttcattgcatatttcagcatatcttctgtaaggttcattacgtcccctagttcagcgaatgcaatctcaggctcaaccatccagaactcagcagcgtggcgagttgtgtttgagttttctgcacggaatgtaggtccgaatgtgtatacgtcacggaatgctaatgcataagcttcagcgttcagctgtccacttactgttaagtttgtttctttaccgaagaagtcttttgactcatcaacttttccgtcttcaccttttggtaggttatttaaatcttgcgttgttacgcggaacatttcgccagcaccttctgtatcactaccagtgatgattggtgtgtgaacatgtacgaatccacgctcttggaagaattggtgaatcgcaaatgctgcgatagaacgtacgcggaacgttgcagagaatgcatttgttcttggacgtaagtgagcgattgtacgtaagtattcaaacgtatgacgtttcttttgaagtgggtaatcagaatctgataaaccctcgatatcaattttttctgctttaatttcaaatggttgcttcgctcccggcgttgcaattactttaccttctactttaactgaagagctaagtggaagttttgcaatttctttgaagttctctaattctgtatcgaaaacgatttgaacgcttttaaagaagctaccgtcgtttaattcgatgaaaccaaatgcttttgaatcacgtaagttacgaatccaccctgatacttgtactgtttgatctgcatacttttctgtatctctatacagactttttactaatgtgttttccatagtgaaattctcctttgctcatatatttaaatacaaaaaaacctttcatccataaagggacgaaaggttaaacttcgcggtaccacccaatttgtcataaagaccaactttaactcgtatgtaatacatacttcccggtttgtaacaggccggattcccgtctaagtctactcttgaatacaaaattcaatttcggttagcaactccaaggtgttcttcacatataccgcctcatcaggctctcaccgtccctgactcgctttggattatagtatatactacttttccttatcatcgtctttcattttgttaaactaaaattaatgtactacattcgagagaaagatgcaaggtgtcggaaaatatatgagcgatttttgtaatatatcgacttaccgacagtgtccgacaaccaatccaataaaaaaattgccggaatgaatccggcaattttctaattacttacgtaactccgcaccgaatttctcttctaccgttgttagtacacggttatgtgcttctgttacttcttcgtctgttaatgtacgttctgcatcgaagtaagtcatagagaatgcaagtgatttcttgccttcttccattttttcaccttcgtataagtcgaatagtgttacgtctttcagaagttctccgccagcttcagcaatgacttgcttcatttcaccagcttttgtttcttttgttactacaacagccatgtcacgtgtcatagatgggaaacgtggaattgctgagtagtaagtttcctcagcgtctgcaccgaatacttttacaagagataattcaaatacgaatgtatttttcacatctaattgtttttctgcttctgggtgcaattgaccgatgaaaccaattacttcgccatctaatacgatgtcagctgtacggcctgggtgcataccttcacgttttgctggtgcatatgtgatttgatttgaaacgccaagcacgtcgaatagtccttctagtacacctttcacaacgaagaagtctactactttcttctcaccttgccatgcatggtgaagagcaagacctgtcataacacctgcaagatgttgttcttctttcggaagttctccttcttctgtcggtaagaagatagaacctacttcgtataaagcaacgctgtcgtttttacgagcgacattgtatgaaactgcttctagtaattgcggtactaagcttaaacgaagttggctacgttcttcactcattggaagtgcaagacctacaggcgccttttcgtttggctcaaccatatattgtttcgctttgtcagcgcttgttaatgaatacgtaattgcttcatataaaccagcaccctctaagaagcggcgtactttacgacgtttcgtttgtgctgatgttaatttaccacgagtcatcgttccagaaggtaatgtaactggaatgtggtcataaccgtatagacggcccacttcttctactaagtcttctgaaattgtaatatcaggacgacgtgctggtacatttacatggaatgttccttctacttctgtaaatgggaatttcaagtttgtgaacattgtacccatttcactcgcagaaatatttgtacctaatacacggtttactttttcagcagtaacagatactgtacgctcttgtacttgtaagttgtcagcttctactacaccttcaagtgcttcaccgccagcatatttcgccattaaagcagctgcgtgttgaattgcttcaaatgtacgtgttggatcgattcctttttcgaaacgtgcacttgattcactacgaagacctaagtcttttgatgtacgacgtactgtttgacctgcaaagtatgcagactcaattagaacgtttactgtctcatttgtaacttcagaatccgccccgcccattacaccagcaacagctaaagctttcgtgccgtttgtaattacaagatggtggctttgtaatgtacgctcttgatcatctaacgtttcaattttttcgccttcttttgcaagacgaacaacgatttcttttgaacctaatttatcgtaatcgaatgcatgtaacggttgaccgtattccattaaaatgtagtttgtaatatcaactacgttgctaattggacgaatgccagctgccataagacgagtttgcatccacattggtgatggaccaatctttacgtttttaaccatttttgcaatgtataacgggttttcttctttcgcttctacacttacagaaatataatcagaagttttttctgctgtttcttgtaagtcgatagctggaagttttacttcgcggccataaatagcagctacttcatatgcaacacctaacatgtttaggcaatctgcacggtttggtgttaaaccaagctcaagtacttcatcgtgtaagtttaaaatttcaagtgcatctgcaccaacttcagcgtcacttgggaagatgaagataccatctgcatattcttttgaaactaactttccatcaatgccaagctcttgaagagcacaaaccataccgtgagaagcttcaccacgtagttttgcttttttaattttgaagttaccaggaagtacagcaccaacttttgcaactggtacttttaaaccttttgcaatgttagcagctccacaaataatttgaactggctcttcttcaccgatatcgattaagcatttgcttaatttatcagcttctgggtgtttttcacattctaatacgtgaccaactacaacaccttttacacctttatttaatacttcaacgccttctacttcaataccacttttcgtgattttgtctgctagttcttgtgctgttacatctttaatatctacatactcttgtaaccaacgatatgatacgaacatatttatcctctccttcccttacgctcgtttgaattgttgtaagaaacgtacatcatttgtatagaaatgacgaatgtcatctactccgtatttcaacattgcgatacgctctgcgcccataccgaatgcgaaaccttgatattcttttgaatcataaccagccatttcaagtacgttcgggtgaaccatacctgcgcctagaatttcaatccagccagttcctttacaagtgccgcaacctttgccatgacacatcatacaagaaatatccatctctacagatggctctgtgaatgggaagaaacttggacgaagacggatttcacgatcttcaccgaacatctttttcacgaatacttgcagtgtaccttttaagtcactcatacgaatgtttttatcaattacaagaccttcaatttgcatgaactgatgcgaatgcgtcgcatcgtcgtcatcacggcgatacactttaccaggacaaataattttgattgggcctttttctttattattttccatcgtacgtgcttgcacagaagatgtatgtgtacgtagtaacgtttcttctgtaatgtagaatgtatcttgcatatcacgcgctgggtgatctttcggtaagtttagtgcttcgaagttgtagtagtctttttctacttctgttccttcagctacttcataacccataccgatgaatacatcttcaatttgctcaacaacagctgttaacggatggtgacaacctgtttcaacaggacgacctggcagtgtaacatcgattgtttcagtagctaatttcgcttcgattactgctttttctaagttactaattttgtcatctaaacgcgtttgaatcgcttcacgcacttcatttactaatgctcccatacgtggacgctcttctgctgacaattttcccatgccgcgtaatacttctgtaattgggcctttttttcctaaatacgctacgcgtacgtcgtttaagccctttagctctttcgcttcttcaataagctctaacgctttttgctttagctcttttaaacgtgcttccattttggaaccctcctaattttaaaaataaaaaaacctcgctcccaaaaagggacgaggtaaattcgcggtaccaccctaaattgacagaacaagtctgcccactcattagttataacgatcaattctgaccggaacgcctttacatatacatggtcctggcgtcaactccagaggtgaattcacttccgtctaccataagaatgctttcagtctacggcactctctccctatatggcgattttgtaagttactcttctctatcaacgtttttcgttatttaacttttaatataatgtacttcaacttattataagaagttttttatttgttcgcaaccgggctttgcaaataatacgttaaaatccctgctgcaaccgcaacatttaatgattctgccccgccgtaaatcggaatatacaagttttgatccgtttttgcaagaatttcttggcgtacgccatttccttcatttcctacaattaatgcaaaactgccagccggcgttacttcaccatacggaactccattttcaagagctgttccatatacaggaacgttgttttcttttaacttgtctacccattcttctaagttcccttttacaattggtaagtggaaaatagagccttgtgtagagcggagtactttactattgtaaacatcaacacaaccttctccaagcacaacggcgtgaataccagctgcatcagctgtacgaataattgttcctaaattacctgggtcttgcaggccatctaataaaaggaatttcccatcagtaagagctacttctttctcatgcttctcacaaacagcaaatacaccttgtgtcgtttctgtttcacgaagtattttgacaatcgcctcaggtacgatatacatttccacatcattaactgtccaatctttcggaaggtctgtctgatctgaaacgataagttctgttacaattcctgccttcaaagcttcctcgactaagtggaatccttctacaaaaaataaaccttttttatcgcgttcttttttcgtttgcagctttttccactgctttacacgcggattttgtactgaatcaatgtttttcataatatgtatttccctctcttcttgtcttatcattatagcctatttttcatacatatttacataaaaaagaacaaaaactaacgtcagtttcaattctgaagaagaggtgaaagcaatgagttttaatttacgcggtgctgtattagcgaatgtatctggaaattcacaagatcaattacaagaaacaatcgtcgatgcaattcaaagcggtgaagaaaaaatgcttccaggtcttggcgttttatttgaagtcatttggaaaaacgctgatgaaaatgaaaagcacgaaatgttagaaacactagagcaaggattaaaaaaataagcaatttgaaaatcacctttgcataagctaaggtgatttttttgcagaaaaattttttcttctcctaaacatttctactttactaacgaactatgatggagtacaatgttcaaaatacatttaaaccgatcgatttttcttcatatacaccataagataaaaggagtgaatgttttatgcaccgtattacgcttgaacaaatttttaaacaccacattacacaaaaatacgtaaaccgttctggaatggtccacgcgatcgctgtcgcttaccatgcgtttcacctagccaaaaagcatcacgcctcagtcgatgctgccacaaaagctggcttccttcatgatatcggacatcatacgtggtacacaggcggtgaatgggattatgacttatataaaaagaatgatatacacgcaattaaaggcgctgaaagagcacataaattacttattagattaggagaacatccaaaactagcaaaagaaatttctattgcaattcttcttcatacagattctttcttagtggaacaagaaattgaaagaacatctcttcaaaatattattaaatgggcagacgaagcagatgaagaaccgggcggagcgcatcattatcgaacaatttcttatgaaaaagcacttaaagcaattcagcaattagatcgattggtagagcgtgaattgcaaatagagcaagcaaaattgaataacaagacagaacatagttatcaatgagaaagaggcatcactacagggtgatacctcttttattattttatggaaaatacacctttatatgtaatatttaaatattacgcctgaaaacaaaatgccttataattaaatatacaaatataaagaggtgattctacatatgcaacccgctacacaactttctaatgaacagaaatactctatgtcatggggacaatttattagctccgttgtattcgcttttttcggaaccggacttattactgtgttcctcgcaatgcccttaacaatttatacagccagtcttacagataaaaaacaaattgccctgtatgaatctatcgtaaatactgcaagtattgtattacagctagccgtgttgttattcttcatttttaaattcgaacccgcaaaaaaattactactacaatcatttaactttaaagcactgaaagaatggcgtacatacgtatacttacttcttttcttcgctataaacattttactcaattacatcttgttaaattatgtgttccaagacgctacaaagcagcaatcttccgcactaaacttagatgtctttaagcagtatcaaatattattacttctcggctttgcaatactcacaccaatttttgaagagcttattttccgtggctttatacttcgctttttctcagaacgctttccattttggattgcagcgattataacaagcttcttcttcggtatcgctcatacatactcacttggcgtaatggtcattactttcttcatgggattattaatggctattttatgtaaaaaaacaaaatccattattccagctatgttatttcatattatgaataatatgttggcattcttgaattagaaagaggtatcctcacgatacctcttttattaattcgtataatcacttctcatttccatcaatttatacatatttattaatattatccaaaataaacttcatgtagtaaaatataacttaattcatataaaggagtttacatatgtttagtgttatttggatgcttttcacgccacttctcttactatgcgggattgctggtggtatttttttaatagtaacaggaattaaatatcggaaattactcgttggtttaatggggctacttagcctatcctttgtcacactaccttttgtttttttaagtataggaattaatatggatacaatattccccattccaactgctctttactggaccctattttctttaactggattattagcagggataagtggattccaagcaaaaattaaaagtatacgtaatatggggttcattatttttaccattggaatattaggggttatcttctgggtactcatgtctgtaggtgattgattctatataacttttttcgaaacccacaaatcggaggtaatacagaaatgttcggaatattaatttggatgattttagcttttactttaatgttatgcgaattcatcgtcggcatttttttaattattgctggtatgaaatgtcgtaaatcatttactattatagctggtttaattagcatatctcttatcgttgttcctatcatttgtataggttatggaatagacttagaggggatgattccaatttcaggaactttatattggggtctcttctctttagctggactattagctatagtaaacggaagacacatatcgagtattcgttctatggggacgattttatttataacaggattatgctctgtaagtggttattaccttttatatcttactctttaaaaagacaaaaaaagcagggaaattaattccctgcttttctatttggtttattgcctgatggtaagaagaacgataacacccaagcgatacctgctagtatcgttgcgattaagaaggcatcgttaataccgttaattgcagatagctttgaaatttgtccatataatagttgtgtgctcatcgcgtctcctgcttgagctgatccagctaaggccgctaaactttgccccatgccatgtattttatcaactaaaattgggtttgatgttgttaacatgttgccgtaatctgctacgtgagcagtcgtttgttgcgtcataagtgtaattaaaatcgctgttccgattgaacccgctacttgtcttgacgtattttgcgttgctgtaccgtgagaaattaatttcatcggcagcgcgttcataccagccgtcataattggcatcataatgaatgacataccaattgaacgtataatataatccgtcataataacgctatacggtgtatccatcgataattttgtaaattcatatgtcgcatacgtcgtaattgccaatccaattatcgctaatggacgaatgccatatttatcgaataatttacccgctactggtcccatgatccccataattaatgatcctggaagaagtagtaaaccagattcaattggcgtaaagccacgaatgttttgcagatatactggaagcaataacatacctccgaataatgccatcgtaacgattgcgttaattactaaagtgaaagtaaatactggatatttaaatacttgtaaatcaagcattttattgtccgttgttaactctctccaaataaataacgctaaaccaattacaccaatgataagtgaaataacaacttctgcactagtccaactattatttccagcctcactaaatccgtacagcaagcttcctagcccaatacttgaactaacaacaccaaatacatctaattttgttttagacactggctgagctagtgtaaagaattttaaagataggaacgtaataattaaaccgataataaacatcgcatagaacattaagttccagctgtaattttcaattacccaacctgttacagtcggtccgatagctggagctaaaatcatcgctacacctagtaaccccatcgctgctccgcgcttatgaggcgggaacaatgtcataaagatattcataccaaccggcattaaaatacccgcaccaactgcttgaattacgcggcccgtcatcatcatcgtaaagtttccggaagtagcacaaatgatagatcctaccgtgaagaataacattgctgctacgaataatttacgatacgtaaatcgtgaaactaaaaatgcactaatcggtactaaaataccatttacaagcatgaagcctgtaattaaccattgtgctgttgaagttgatacgttaaattcattcattaacggaggtaatgcaacgttaatgattgtttggtttaaaatagaaacgaacatgccgagaattaatacagctacaactgcttttacgttcacattctctacaggcgtagacatttgttttttcggcacttctttttcttgttttacttcttcttgctttcctgtttctaactcaactacattagaaatttccgattcttgctttcgttcaatttctttctcttctgtttcaactttacttatttctattttacttacggctgggacttgttcttctcccattttcgtttttttctttcgtaaaagacgatttacaaggaagaagacgattatacaaaatagtgcatatcctgcaattacaattgaggacatctcatctcccccttacttatgaatacgaactgtcacattcatgccaggaacaatatttactgatttgctatgatctaaagaaattttaactggtactacttgtgttactttcgtatagttcgctgttgcgttgcttgatggcaacatagagaatgtattcgctgttgttaagccaacttgttctacttttcctgttaacgttgtatctgggtatgcatctacatacacatctacattttgacctttttgaacatcatcaacatctgtttcttcaatgtttgctgttacccataaattgttcatatcaaatgcataagcaatcgggctacctgctccaacgaaagcatttgttgtcgcgtttgattgtacaactgttgcattttgtggaattgttacatctactgtttgttctccattagctgccgctacagtaacagtacctaatttatcgttctcattataattttttcctacttcagctttccattcagttagtttacctgctactggtgaagcaaccggaattacctttccatcaatctttgcattgtctgtttttaagtaattttccgtttgattgtaatagtaataaccgccaataccgccgccaactagtacaattaatgtgataatgttgataattaccattcttcgaaactgattcattgcattcctctccttatatcgcatataatttttttctaaactatttatgtccttattgtttagattgtttaattgttaattatattaaccttttaacaaaaaaatcacaccatttgcagcgtaaatcgaaatttatctacctgcgagcggtgctgatttctgaaggactatcgtttataattataaataattattttgaatctacaaccgacaatttatgtatgaaatgtcggttaaacaacaatataataccaatatgttgtttaagtatagaaaattaaacgaggggaaataaaaatgtctattaaaaatacaaatgatccacgtgtaaaacggacgagacaactcatacaggatgcttttgtcgctttagtaggcgaaaaaggttttgaaaatgtaactgttcaacatattgcagaacgcgctcctgtaaaccgcgctacattttatagccattaccacgataaatatgacttactagacaaaagcattgaagaaatgttagaaaagctaactgaagtaattaaaccaagaaatagaaataaagaagatttccaactaacatttgattcgccacatccaagttttttggccttgttcgaacatattgcagaaaacactaacttctataacgtcatgcttggtgataaagcggccggaaactatacgtataagatgatgaaagcaattcaaacgcatttaacattaagcctctctatttcacaacctaacgatgaaaaactaatggttccacgcgatattctcattagttatgttactggtgcccatctagggatgattatgtcatggctaaaaagagggatgatatataccccgcattttatggcgatgcaattaactcgtttaattattttaggtgctcatactgcagcgggattagaacggcctttttaaaacataaaaaagcgaaggagaatgtccttcgctttttctattaattaaatgtaatgttatgtacagcctctttatcaagacgtttaataacttctacaattaactttactgcattttcataatcatcacggtgtaacattgccgcatgagaatggatatagcgcgttgcaattgtaattgccatagaaggaataccatttacagcaatgtgaatcgcacccgcatccgttcctccgcccgctactgaatcatattgatacgggatttgtaattcatcagcaacatcaactacgaaatcacgtaaacctgtatgtccaataacagaagcatcatataaaatgatttgtggtccatcgcccattttactttgcgcttcttttgacgttacacccggtgtatctccagcgataccaacatctactgcgaacgcgatatctggtttaatataattcgcagatgtttttgcgccacgaagaccaacttcttcttgtacagttccaacgccgtatacaacgtttggatgcttttcatcttttaattgttttaatacgtcaattgcaattgcacaaccgattcggttatcccatgcttttgcaagtaacattttttcattcttcatcacttggaattcaaagtaaggtacaacttgatctcctggtcgtacgccccactccattgcttcttcttggctagaagcaccgatatcgatgaacatgtctttaatttcaactggctttttacgagcttctggaggtaaaatgtgcggtggttttgaaccaattacacctgttacatctcctttacgcgttacaatcgtcacgcgctgcgcaagcataacttgtgaccaccagccaccaaccgtttggaagcgaaggaaacctttgtcatcgatttgtgtaatcataaatccaacttcatctaaatgacctgcaaccataattttcggaccgttttcttcccctacttttttcgcaactaaactccctaaattatcagtagaaagttcgtccgcaaacggctcgatatatttcttcattacttcacgtggttcacgctcgttaccggcaataccacgtgcatctgttaattcttttagcattgtcaatgtcgcgtctaattttgtcattgccaacaccctcctttttcttcagtcaatttattatacaataattaaattgaaatattcaaaaattaaattagtatccttgtgtttgacgctgatgatttacttcatttttatctaaatatgctttttcaatctcttcttgctcaaattcaagtgcttgtccaagtcgaagatagctcgtaaataattcaatatagtttgtaatagatggttgatctgtaaaacgaattactttcgcatatgtgtctaagaaaatttccacttgtgttttattcgtttgtgcacatttatagaataggaagtttttatcaatacctaaatcaattccgattgataaaataaaatgcaaaccatctacgtactcttctaatattacttcacgttccgaagctggtttgttgctccaatatttaaaacaacgtgtttcatttgcaagttctccaatttctacaagaagagctaacattttttcttttaacaattttttcggttgtaagtcatgttcttttgcaatacggtcatctaattctttttgtaatttaaatagttgtagtaagtccattctattgtcctcctccaacatcgcatttttcgcaacaatgttgtttcatctcaaagttcattattatgtttcagttcttatgaataagtcagctatctacctctttataaaatagcttgtccttaatttacaaatacgtttcagtcatcgctcttaaattgttcatctgatgaaagttccatatcatctttccattatagcagtgtcgtttcggctaggaaagatactcttctttccaaaagagcagaattaaaaaaagccaggagtattctcctgacttcatatatatattcttctatactgctataacttttatattgattttgtcatattgataatgacatagtcgttaatctttagaatttcttttcacttctaacttctctttgaatacaaataaaaaaccttagaagaaaattcttctaaggttttaactaattaattagttaatgttgttttttgcaactgttgctaattcagcgaaagctttttcgtcatgaacagctaagtcagcaagcatcttgcggttaacttcgatgccagcatttttaagaccgtgcattaagcggctgtaagaaagaccattcatacgagctgctgcgttgatacgtgtaatccataatttacggaagtcacgtttcttttgacggcggtcacggaatgcatacattagagatttcataacctgttggttagcaaccttgaataatgtattttttgaaccgtagtaaccttttgctaatttaattacttttttacgacgttgacgagtaactgtaccaccttttactcttggcataatattacctcctaattgttctatatatcagccgaacttattttaagttgtcaagcatttgacgaatgcgtttgaagtcaccagcgcttactacaccagctttacgtagtttacgtttagcttttgtagatttgttagcgaataaatggcttgtgtaagcgtgagaacgtttcagtttacctgatccagtctttttgaaacgctttgcagcgccgcgatgagttttttgtttaggcataggtatttcctcctctatctattacttatcgtttttcggtgctaaaactaagaacatactgcgtccttccattttaggcttagattcaactgtactaacttcagcacaagcttctgagaagcgatctaaaacacgttgaccgatttctttatgagtaatggcacgtcctttaaagcgaattgacgctttaaccttgtcgcctttctctaaaaacttgatagcattacgaagttttgtgttaaagtcgtgttcatcaattgttggacttaaacgaacttctttcatgctaattactttttgatttttgcgctgctctttttctttcttctgttgctcaaagcggaatttaccgtagtccataatgcggcatactggcggtttcgcatttggagcaactaatactaaatcaagattaagatttgcagctaagtctaaagcgtcattacgagacttgattccaagttgatcgccatttgcgccaactaaacgtacttcacgtgcacgaatttgctcgttaatcatcatatccttgctaatagtaagccacctccaaggttttctcagaacatattttgtagtcatagaacccgaacaaaaaaagtgcgggcatacgacacccacacttgtaaaatcttaagtaagaaatacatttacctgttaactgcgaatgcgtccatcaggtgagaagcgggtgcttctacttgttccacaaaacaatattctattatccttgatgagtttatcataggacatgacgtctgtcaagaagacgcgatgtgttttactaacaacaagaaatattgtaacaaacaactaacatacttgcaatacttttttatgataagtgtcacatggttattttttctaatttctctcgagtatattacataaaaaagccgcggtataccgcggctttttcttatcgttttccttctactttaatcatgtcaacaaaagcatctaatgcgattgtttctgatttttgttcaccatatttacgtacgtttacgccgttttcagttacttcattgtcacctactacaagcatgtacggaattttttgcatttgtgcttcacggattttgtaaccgatcttctcttcacgagtgtctaattcaacacggataccagcacgacgcaattcgtcttgtactttcttcgcatagtctaaatgtacttgcggagaaactggaattacttgtacttgaactggagctaaccatgttgggaatgcacctttgtattcttcaattaagaaggctacaaaacgttccatagttgatacaacaccacggtgaattacaactggacgatgttgtttaccgtcttcaccaacgtatgataattcaaagcgttctggaagtaagaagtctaattgtacagttgaaagtgtttcgtcttttccaagagcagtacgaacttgaacatcaagttttggaccgtagaatgccgcttcaccttcagcttcatagtaatcaagacccatttcatccatagcttcttttaacataccttgtgctttttcccacatctcatcatccgcataatactttttagtatctgctgggtcgcggtaagatagacggaatgagtagttctctaaaccgaaatctttgtacacttctagagttaagtttacaacacgttttaactcttctttaatttgatctggacgaacgaaaatgtgcgcatcgtttaaagtcattccgcgtacacgttgtaatccagataacgcacctgacatttcataacggtgcattgttccaagttctgcaatacggattggtaattcacggtagctgtgaatatcatttttataaaccatcatatgatgaggacagttcattggacgaagaactaattcttcgttatccatttccattgatgggaacatgccatcacggtagtggttccagtgaccagaagtttcataaagctctctgctccctagtactggagtatatacgtgatcatagcctaagcttgcttctttatcaacgatgtaacgctcgataatgcggcggattgttgcaccttttggtaaccaaagtggtaaaccttgtcctactttttggctattagtaaatagttttaattctttacctaatttacggtgatcgcgctctttcgcttcttcaagcatacgtaagtgctcatctaattctgctttcttaacgaatgcagtaccgtaaatacgttgtagcattttattattgctatcgccgcgccagtaagcacctgcaacgcttaataatttaaacactttaattttccctgtagatggaaggtgaacaccacgacaaaggtcgaaaaattcgccttgctcatagattgaaataactgcatcttctggaagatcgttaattaaatctaattttaactcatcgccgatttcttcaaagcgacgaattgcttctgcacgtggtacttcatgacgaacgatttctaagttctcgttcacgattttttgcatttctttttcgattttcttgaagtcttcaactgtaattgcttcttccatatcaatatcgtagtagaagccattttcaattactggaccaatgccaagctcaaccttaacatctttatataaacgttttaacgcttgtgctaaaaggtgggctgttgaatggcgtaaaatatataggccatcttcagaatctaatgtaatgatagaaactgcaccatcttcttcgattggtgtaacaagatcgatcatctcatcgtttaattttccagctacagcttttttctttaagcctgggctaatagaagctgcgatttcttcagttgttacgccttttggaaactccttcacagctccatcagggaaagtaattttaactacatctgccatcactggtcactcctctttttctcaaaataaaaaacactcatcccgtaaaaagggacgagtgttgaattcgtggttccacccttgttccaattaacataattgttaattgctcaagttcaacataacggtgttgtccgttagcaattactagaaaaaccgttcactgctaaagtttagaggtggtaagtaataatcccgtactaggaagctcacaccctaaggcttccctctctgaaaatcgtagaaaactactcatgtcctcatcatgacatttcaatatatttcatttatgtaggtaattatatgctcaaaaacttagaaaatcaagggcgttacctttattttttaaatttttcacattgcgctcaaaatcatgtaatccatgtaattggacccgttcttggaacacatttcgcaaagtaataatcatattatggtcttgttctttcgtatataaataaatctttttaggcgaaatagaaagaagcggcgcaattactttcgtatcaatatatacatcattttgctttaataattcctcatctatatattggaccaacttctcctgttttaaacgtctacctttatcatcataaaagataaagctttcatcaaaaataagatgcacgcaagacaaacgtgatttacggctacttacttgttgccgaagcgtctcaatgaacatttggtattcttgctccatcttatattcatcaattgccacttccgcaagtttagtcaccatttccctatatgtacgaagacgaaaacggatatatgatgaaaacgagaatgagagcggatcacaaagccaattatttaaagaagacttaatatatgactcaaatgcgttacgcgttaaatcctgagctacaccttttcttcttccctttaaaatctcatgtgccatgtgcaatatttgatgacactcttcttgttcttcataaaaaaacttttcttttaaaatcgtataaatccactcattttgtttcacattcacaatgaaatacaccattactggcaataagattttttcaatataattcgattcacgtactggtatgtgaatcaccactttttgttcctgtaaatacacactcgtttccttatataacacttccgctcttttcagcaattgtctatatacgtgcatagcatcatttttttcttcgaagcaaatttcaatcacttttgtccccccttttatccccgctctaaaggactgtatctatacgttacaaatcctataagagtccgtcccgcgtgaatttcactcttagtagaatcacatttcctatcgttagaaaatccactcaatatggcttgctaattttatatatattaagggagggagaaaaaaatgatacaagctactatgaatttttattgtatactttacttatcaataaaagggggtatctgaatgtttgaatataaattcgtaaaagtcgaattacattgggggttcactcgctcaaaaccagctgaagactaccaagaaattattcaagaacatgctagagatggctggaggttcgtacagattgttgcccctacgtttggcagttctggacaacctgaatatttcgatctcatattcgaaaagaaaatatcactataatacaaaaaaagagcaagctgagaagcttactcttttacttatgacgacggtttttcccaccaattggaactggtttcgctaaatatttaattctttccataatacgtgctgctttcatttcttcagcctcaccacgctgcgtatacgttaaatggtgttccagttgtttaaaatcaaaattagacgtaaagaacgtcggtaagttttctaacatacggaattgcaagattgcaccaagcacatcgtcacgcacaaagcttgacatcgcttctgccccgatatcgtctaacattaaaacttgtacgcgtttaaccgcatcaatcttttcaccaatcgaattatcttgaattgaacttttaatttcacgtaaaaattccgggaagtatacgagcatcgaacttattttctttcgagcaagctcgttcgctattgctcctaaaaggtacgtttttcctacaccaaatttaccgtacaaatataaaccttgtgcttttttacctggttcatatgtacttaaaaattcattcgctgcaccaattgcatcgatacgtgcatttaaatcagaagggtctaagttttccatagttgcctgcaaaatatccgttggcatatatacactttgaacgagtttttcatatttctttctctcgtcatgcgctacttttctaacgcagcgatcgtattgaatatcaatcatcttcccttgaataacaagctttggctcataaccttgtagcatatttttacatgaacctaaatccggacaatccacgcaacctacactttgtccaatatattcatataacttcacaagactgcgctcaatcatagaagtcgttacttcacccttatgttcgtctataaattctttcacccgcggatgcgccattacttctgcctttagtacttcatatctatttttaaagttttcattttccattaattttgcaaatgaattttgaatatgctccattttctcacctcaaagagcgttcattctcttctattaatcacgcttatatttttttaacacttcttctagtcgttttctttcatcttctagcgtacttgcatctttttctacacttgtatctttcttctctgtttctttctcttgttctttcggctcttcttccttaagccaatctggcaccatttctttccgcaccgttttcttcgccgtacggccttttttcttcgtctcagcccactcttgatattgacggttctcttctttcgctaacgccatcgcgtccgctactgtaccgacctttttacgtgcccaatgcccagcaatcttctcgacatacgttttcgcaagtttcatatctgagcgtagcataacgtaataaataagtacattcacaactcctggtgtcaatttttgattaatcatgacatcttcaacgatctgcaagtccgctttcgttgcctctgcaccaccagaaatctctttcaatagttgttttggcgagatttcctctagctgctttattaacatctcctcttgcgatgaaggctctttctctttcatcgtacgtgcagcatgaggctgtactctttcacttaataccggtaatgcttgaccattttcaaattgataccaatcgcgcgctccttttctaagcctttccgtatcaattgtttgcatctctgtcactgcaccaagaacgatattttgcatcgataacacatctacaccatacacgtaagcaagtgttataacgcagtctctcacttgatctgtaatcgcctttttaggaacaagagcggacaatccatctacaaataaagagaaatcaaagaaatcattccaaactttcggagcgtctcccttctcgttacttggcatagttgtcgtttttggaatacgaaggtcttcttgcgcatgctcaagctgtcctggattaaacgaaccaaacacatcattgaaagaacgcgtaacattttcataagaagcaaaatcaaattcttcttctaagaaatattgctttacttgattatattttgtccggctcaatcgattgtataaaaagatacttaaaacaatatcatcaaaaaactgcttcggagataaaggtggttgcaactcatatatgaacattcgaatatctttttctttcttaatatataccttcaatagcccaattgcctctaactttactcgttcctcatatatttcaggaagttgcatttgcatagtcaccataagggaatgatgcgtattctcttttccaaatacacgatcttgctctagctctccccatagtgtcatgtataagctaaaagctctactacctattaacggctgatacaacatcgttaacacttttcggtcgtaattgtgcagtagccctttcgcacttactttataacgatcaatcggcaatagctccatccatgactgtttttccattcttgcttttcctttctctcatccaatctatcctctacttcattcgttctatcttcattatataaattcttagtgaaaaagagctattagcttgcgcttctagctctcttatcctattatttacggtatgtaaagagaataaaatacaacttctactctctttctttttgcagtatatcttttaattcttcaataaatacatttaaatctttaaattgacgatatacagaagcaaaacgtacgtaagcaacatcatcaatatcgcgaagttcttccatgacaatttcaccaatcatatcacttttcacttctgatatacctaaattacgcagttcacgttccacgctttgtgttacttcttctaattgtcttaaagatactggtcttttttcacacgctttaattaaaccacgtaaaatcttttctttattaaactcttctcgtgtgccttctttttttacaacgataagaggtgactcttctaccctttcaaaggtcgtaaagcgacttaagcagctttcacactctctccttcttcgaatagagcgcccctcgtctaccggacgcgaatctaacactcttgtaccattatgagaacaggatggacaacgcaatacattcactcctttacactatactctttatttttctctactcacttcacctaaaatatatatacaatattatataactcattctaactctcttaccactttaagtttcagcgcatcactttatcatctcatccttaaaaataagatggtatatagagcactacctcatttgcaagaatccaatttattcaactaacgagtacgttatatttttccttttttataaactaaaaaagaggtgcattatacacctctttacattttaaatcaattatgttcttttttaaagagcttttgtttctctctgcttaatttcgaagctaccagttcctcgaggaagctcgatgctctcacgcgttttcgcgtttaaaccttctgcaatatattctgcagcaacatttggatcaatacgatccccacaagtataaacatcaatacttgcgtaaccgtgctccggaaagctatgaattgttaaatgtgattccgagataattactactccacttacaccttgtggtgcaaatttatggaaagcaacctcacgcacttcagcaccagcttttagtgctgcatccacaaataattgttcaatatacggcatgtcattcagtttgtcgaaatcgcaatcccaaagttcagcaatcacgtgacgacccatcgtatccatagtatccattctacagttcccccttgtaaatttattctaactgttcgaattgaaaactaatttgcaatttggcttgctccactaccacgggggaaagttagtccagagaggtcctaaccctttaagtagtgactacgtacctcagctcttaagtttacgagtgttagtatactttgtttattttcattttgcaacaacagttttttcgattttctgtcatattttcctctttacttttccctaaaaaaaataaacgattcacaaatgcagtaatcacaacgcttcgtggtatgtccacttttttaaatatacttatataatttttttccttttcagaaaaaattaaaaaaagagggcaaatgttgccttgccctctcctcccttattcacttaaatgtgttgcacattttcttgtttcgctaactcttcaacaactaacgttacaagatctacaacacgacgagagtagccccactcgttatcataccaagcaagtactttcactttacgatcacccattaccattgtagataaaccatcaataatagctgagtgtgtatttgtattaaagtcgatagatactaaaggctcttcgctgaattctacaataccttttaacgcaccgtttgcaacagttttgaatgcatcgttaatggcttcaactgtcacatcgcgttttacatctactactaaatcaacaagagacacgtttggtgttggtacacgaagtgccataccatgaagttttccgtttaaatgtggaagaacttttgctagcgctttcgcagcacctgtcgttgtcggaatgattgattgtccgcaagcacgtgctcttcttaaatctttatgtgggttatcaatatttttttggtcatttgtataggcgtgaactgtcgtcattaaaccgttttcaattccaaactgctcatctaacaccttcacaacaggcgctaaacagtttgttgtacaagatgcatttgaaataacagtatgttttgtaatatctaattggtcttcgttcacaccaactacaattgttacatcttcatttttaccaggcgctgttaaaattacttttttcgctccagcttcaacgtgaagaattgctttttcttttgaattaaatttaccagttgcttcaattacaacttcaacacctaaatctgtccaaggcaattcctttggatcgcggttgtttaaaaggcgaatcattttcccatcaactaataagtgatcttcaaatgcttctactgttccgtcaaacttgccatgaactgtatcatatttaattaagtgtgctaacgtttcagatggatagcttgcattgattgctacaatttcgaatgcgctttcttttattgcttgacgaaataccattctcccaatacgtccaaatccattaattgccacacgagtcataatatgttatcccccttgaatgcgttatactatttatctccaatcccaataatagtataacacaaaaaggggatatgtcactaagcattttcattaatttcacaattttttagtcaataatgttccacttctttaaaattacctgcaattgtgttttcgttcccataattgtgccatcattatttatcacttcatctgcatttttcactttttcttctaacggcatttgagattgaatacgagctgttgcttcttcttctgaaaagttatttcgtttcattaaacgttctaattgcgtatgcggcttaaccgctacaactaaaattcggtcaacgagacttgttaatttgctttcaaataagagaggaatatctaacacaaccgcttgcataccttcttttatgtacatttccttttgcctattcatttcctcacgcactgcaggatgaacaattttatttaactccaatcgtttttcttcattatagaaaacgacacttcctagttttggacgatctagttctccatcttcttgtaacacttccgttccaaatacttctactattttgttatatgctggttttcctcgctctacaacttctcgtgcaataatatctgcatcaataactggtatgctcagttcacgaaacatttgagacactgtactttttccacttgcaatgcctcctgttaatccaattactactgtcatcataatcctcctcataataaaaggcgcgaaactaatgttccacgcccatacttacattttccaaattccaataataatgagtaatactccaggcaggaatgtaaatttttgtaaccacttcatattcgataaaaccgttccaagtttcattccaataaataaaaacaaagaactcataattgcaactaatatcgccatcatagcgggtacataccctaataaagatgcaccaattccggcaccaaatgagtctacagaaagagcgataccaagaagcaatgcttctcctgcagaaatggttcctgatttatcaaaatctgctacagtcggtttccgtaaaatttgaatcactagccctagcgaggcaatctctaatttccagaccttctcctcttgcttcggttcttcttttttctcacttcgaaaaaattgatataatacccaaatccctattccaataagaacaagcccaccgatacgcgttgcgataacaggtgaaaatactttcgcgatcatatgtccaattcccattgaaacaagcataacagccgctgaacacattccgataattataattgatcttagtggaattcttacgcttcttaaaccatatgttagccctacactacagctatccaagcttaatgtaaaagctaataaaataagagataaataaaggtacatcggtaagctcctcccttatacatagctctgctgtatgtatatgacaaatgcctatccgatgttatctcttttctatattctaggctgacaaattgggcagtaatgcgttcctcgcccgccaacaactgttttttctaatatcgtgccacaagttacgcacggctctccttttttcccatatacatttaggagttcttggaacgaaccaatttgcccttgtgagttgatatacgtccgaattgtacttccgccacgctttactgcttcgcctagcgttgtaacggtagcctcataaattcgctcaatttcttctactgttaaagacgaagcttctcgttccggatgaatttgagaacggaataaaacttcatctacatatatatttccaagccctactaaaagacgctgatccagtagcacaacttttattttacgatttgtcttttgtaatctttcttgtaaatactgcggtgtcatttcaggatcaaatggctccggacctaagtccgcaagaggcatttggttcatttcttcacctttcttaaagagatgcatcgtaccaaactttctcacatctttataatgtaattccgttccatctgtaaataagaaacggacgtgcgtatgtttatcaatcggctcatcctcttgatgtagtaaaaacttaccttccatacgcaaatgtgaaacaataacataattcgttacatataaaagcaaaaactttcctcttcgctttatattttcaatcttctcgccttttagcatttctttaaagatttctgcatcatccggtcgtttcactatttttggataagtaacaataacatcttcaatcgtttttcctgttacaagattttcaagtgtccgtctgacgttttcaacctctggtaattcaggcatttcatcacttccttattttgcgtcgtaccaagttggaccgtaagaataatcaactttcagcggaactgcaagttcaattgcatgctccattacttcaggtacaagcttctctaatttttcaatttcttcttttggcgcttcaaatatcaattcatcgtgtacttgcagaagaagacgtgcttgtaatccttcttcttctaaacgatccgccataataatcatcgcttttttaataatatctgcggcagtaccttgaattggtgtattcatcgctgtacgctcagcgaagctacgtaaattgaaattacgactcgtaatttctggaatataacggcgacgatttaataatgtagccacatatcctttttgtttcgcatcttttacgatgtcctccatgtattcttgtacaccagggaaactttctaaatacttttcaataaattccgctgctgcttttcttgtaattcctaagttttgtgaaagaccataatcactaataccatatacaattccgaaattaacagctttcgcttgtcgtctcatatttgaagttacttcatcttttttaacgccaaatacatccatagctgttttcgtatgaatatccatatcatgttggaatgcttcaactagccctttatcatttgcaatatgagctaatacacgcagttcgatttgtgagtaatcagccgcatacataatccatccttcttctgacggaacaaatgcctgacgaatctttcttccttcttctaatcgaattgggatattttgcaagttcggatccgttgaacttaatcgacctgtttgcgttaacacttgattaaagcgagtatgaattttagatgaatcttcatgtacaactttcagcaaaccttcaatgtaagttgaatttagtttccctaattgacgataatgtaaaatatttggaataatttcatggtgattcataagcttatctagtacatcagctgacgtagaataacctgttttcgtctttttaataaccggcaagtttaagttctcaaacagaataacaccaagctgcttcggtgaattaatattaaattctgttcccgcaagcttataaatttcctgttccatttcctttaatctacccgcaagttcttctcccatattacgaagacgctctgtatcaacttttacaccctttacttccatatcagctaatacacgtgcaagcggcaattctaactctgtaaacagttcatattgctcattcttctttaactcttcaacgaatgtttgctttacatcatataatacatgcactttacgagccacatgctccgctactacctctaactttggaacagcacgcttcgcaccttttccgtaaacttcttcatcagatttcacagcatgcgtttctttcattttcgctacagtacggaagtctttatccgtatcagctggatcaagtaaataagcagcgattaatagatcaaagtcaatcccttgcatatctatcccattccatttcagtgcaacgattgcacgcttcgcatcaaatgtatgctttctcatttctccatctgcaagccactctttaaaagcatctgacttaagagcaatgtctgtctgaataaagtaacatccattttcattttgaataccgaaaccttgaatgtctgctttatgatagttatcttcttgtacttcaacgataagcgcactatcttgctgaagcatttcttctgtaacttcttccacaatatcaaatgtaatatcatctaattcagctggagcagtttcttctggcgtaacgcctaatttatttaaaagggatgtaaatcctaaactctcgaacattggaatgacatcacttgcttcatatcctttatacgccatatcatccacacgaactgtaatcggcgcatctgtaataatagttgcaagatccttactcataagagcttgttctttattttcttccagtttttcttttaatttcttcccacttacttgatctatattttcatacaccgcttcaaccgttccaaactgtgttaacaatttaattgccgttttttcaccaactcctggtacacccggtatattatctgactggtctcccattaaacctttcatatcgataatttgctttggtgataagctgtatttttcaaataaagcttctttcgtatattcatccacttctgtaatcccttttcgcggaatacatacaagcgtgttatcagaaacaagttgaagtaaatctttatctcctgaaataacttttacacttgccccttgctcactcgcttctttcgctaacgttcccatgatgtcatccgcttcataattttctaattcataacgcggtacattgaacgcatccagcatctcacgaataaacgggaactgctctgataattcaggtggagtcttttgacgccctcctttatactcactatacgttttatgacggaacgttgttttgcctgcatcaaacgccactaacatatgagttggcttttcttcctctaatattctcattaacatcattgtaaaaccgtaaattgcgttcgtatgtatacctttgtcgttatttaaaagcggtagtgcaaagaatgcacgatacgcgatattattaccatctactaatacgacctttttttccaaaattgaaacctccccatacaaatttgaaatgatttttttcacagaaaaaaaccgttcctttcctctctctatattaacatgactaatagagagaagaaaaataacggctattttctttcatatataaaacagacttatattggcataaagggaagtgacgagaacagcttaactattctcgtccaaaattactccttggatgaaggggttttcatgtattatattaacagagctttattaatatttaattaagccattgttaatatattgtaaacatccttcatcctatttttcagttgctgatttcggtaaaacaactgtaaacgttgttccttctccaacttcactatctactgtaatcgtaccttgatgcgcctcaactaaatgctttacgatcgacaatccaaggccggtaccaccagtatttctacttcttgctttatccacccggtagaaacgttcaaaaatacgcggaatttcctctttactaataccaattccagtatccgatacttttatataagcattatatttatcttccgctaactctactgaaacaacgcctccagccggtgtatatacgattgcgttattaattaaattaataaagatttgtttcaaacgacttggatctccaataacagaggcacgttttaatacattcacttgtaaagagatttctttttctcctgctttattatcaagcaccatatgaatatcttcaagcagccccttcatgtcaacggttcccatatttaatttaaatccttgttgttcgatcttcgacaaatctaataaatcttcaattaatccttgcatgcgctcactttcttttaaaataatgtgcaagaaatgttcgcagaattttttattatccatcgctccgtctaagagtgtttctgaaaaacctttaatagaagtaatcggtgtctttaattcatgagaaacattcgctaaaaagtcttttctcatttgttctaatttctttaactctgttatgtcatggaatacgagaacaatccctttccattcatggtttgtcccgataataggcgctccatatacttcgaaatgcttccgttcaattccaagtggtaataacatttgtttacgcactttcacttctgtcataaagatttcttctacaagctcaataatttctgtatgatgaaacgattcataatataagcgatctaaatattcttcatctgttacgtggaaagtttccttataagagcggtttacaaggtttatatatcctcggctatcaattaaaatcattccgcttcccatattttcaattaacgtatgcagacgatcttgctgcatttcttgttcaagtgtcatctcttgtaaatttcgtgctaaaatattaatcgctttactcagcattcctgtttcatccgaatgactttcgtatgcacgtgctttataattaccctttgccaattcaattgcaactttcgtaaccgattcaattggcctaatatattgccctgtaattttcatacctaaaaatacaactacgagacaagcaatgacaaatccgataattaataatccccacgttttttgatgtacgtctcttaaaggatcaattatacttttcaccaaaatgtatccttgttttccttctacatcttgaacgaacaccgcatgataaaattcattctttcgatccgtttctttcgtaattactttacttcgttgttttgccacttccgaagaaagttctttaatcgtctctggactaaatgccaattcttgtccttttctatattgaactttctttttttcatccaaaaatacgatagaagctggtattttttcttctaacttttcaaatacgtatggattttttaagacattatcaaaaccttgctcttctgctaacgtcgcaacatactccgtctcttttaccattctctctttagcatgatctatatagtagttttcaaacacagtttctagtaataaacctagtccaactaaaataaatacaataagagaaacaaatgtaaaaagaagcctggaacgaaatttattcattcccttttggctcctctaatttatatcctaaaccacgtatcgttttaatgtacgtcggttttttcgtattttgttcaattttatcgcgcaaatggctaatatgaacatcaacaattcgtgtatcaccagcaaaatcataattccatacagcacttaataattgatcacgtgtcaacacgcgacttttatttttcgcaagatacacaagtagttcaaattcttttggtgttaattcaagctttcttccttggaaataagcctcataaaactccggtaaaattttaagttctgcaattgtgatgctatcttcatctggcgcttctgcaacttgttcttcttgttgtaatttcgtacggcgcaaaatcgccttcacacgagcaactacttctcttggactaaatggctttgtcatataatcatctgccccaagttcaaggcctagcaccttatcaaactcatcatcttttgccgttaacattaaaatcggcgtcataacgcgctgcaatcgtaattctttacacacttccataccatccattttcggaagcattaaatctaatataattaaatctgggcgttctgttgtcgctttttgaagcgccatttctccatccatcgctgttataacttcaaacccagcttgttgtaaattaaattcgattaaagttaagataaattcctcatcatcaactactaaaatacgattgttcattcttttcctccaagttatagacttgaaaccttcttcatcctagtattttccccgttattctcatcatactagaaaacaaggtccctctcaatataattgtctattcatggattcggattgtgctattgttattcctaaaaacaattacgttcgcctcaattatgttttgttatccatactttatatacttccatatcgttattaaattctacttccgtatgaatattgagttctcgattttgcgctaagagaaaagataaagcatacgctattttataatctggtgtttcatatccatcaaatactctcccgtacatttcattcacaaacccgtctgcccacacttcagcttctcttaccgtttcaaagatcgcgtcttctcttttccacctcacctaaaaaatcactcctttaattgacttcaattaccgataataatattattaatcttaatatataaattaataatattcggaggtctattatgcgactaatactatccattctatctttagcaatcacatgtatccttgcttttaacgctcctagctgggatacgattaaaacgggttgctcagaatttgctgaagggttcaaagaagggtttttcaactaaaaatagcgctagcatccttattaaaggtatgctagcgctatttttattttcatcttttaaaagttatctaatgctttttccataatggaaacagatttataaggtggcgttactgttaatgaaccctttacaacagtttctcctttttcatcatgagcagatacaagcatatcaattgtatgttcctcctcagaaacagccacaacttcaaagtggatttgtaacgtttcataatggtgaacatgtttcacgaatgtaaggtcctttctcgtaatatgacttcctggacccggtaaatatttcgtaaccgccgttgtaatcattcccgttagcataatgcttggtacaatcggcttttcatacggagtttgggatgcgtaatcatgctgaatatataatggattggcatcattcgttaaccctaagtacaataacaaatctttatcctcaattttttcagtgatagataatttctctcctactgtaatttcatccattttacgaccaatttgaacttttttctttaacatgttacaaccccctccgattttttcaccttattatcctactaaaagcgataccttatccgaaatttactatgatgagggcaatgtatagtataaatctacagtttcattataggatattacaaatgatagcgttttcatattatttcaaaaaaacaattcggtaaatagtagaaaaagattcggaatcccgaatctttttcactactattcaattattaaacaagaactttcattacgttacgtacagattctacagagcgatctaacgcttctttttcatctgcaagaagttctaattcaataattttttcaattccgttaccacctagaattactggtacccctaagtaaaggtcactataaccatactcaccttcaaggtacgcaatagccggtaatacacggcgttgatcttttaagattgcttctgtcatttcaactaaagaagctgctggtgcgtaatatgcactaccgtttcctaataagcctacaatctcaccgccacctttacgtgtacgttctacgattgcttctaaacgctctttcggaattaacgtttctaacggaataccgcctgcatatgaataacgcacaagaggtaccatgtcgtcaccgtgtccaccaagaacaaatcctgtaatatcttttacagaaagatttaattcttgtgcgatgaatgtacggaaacgagctgtatctaatacacccgattgaccgataacacgctctttcgggaatcctgcttctttaaatacagaatatgtcattgcatcaactggatttgttaacacaacaataattgcatttggtgaatgttttgcaatgtcgcgcgtaatacttttcataattttagagtttgttgctactaagtcatcacggctcataccaggcttacgtgcaatacctgctgtaataacgacaacgtcagaatcagcagtatctgcgtaatcagatgttccaataatgttagcatcaaaaccttgtactgggctcgcttctaacatatctaacgctttcccttttgttggattttccagttgtggaatgtccactaatacaacatctgccagttctttttgtgctaataagaatgccgttgttgctcctgtaaatcctgcaccgatgactgaaaccttcttgcgtttgattgtcataatttacccccccgctttaattatgcgtttttgattatcgctacatccatgtttttaataagttcattagcgaactcagaacatttcacttctgttgcaccttccattaagcgtgcgaaatcataagttactacttttgaagcaattgttttctcaacagaagcagttactaatttcgcagcttcgttccatcctaagtgttctaataataatacacctgaaagaagaacagaagatgggtttactttatctaaacctgcatattttggagctgtaccgtgtgtagcttcaaagatagcatgtccagtcacatagttaatgtttgcaccaggtgcaataccaattccacctacttgtgcagcaagtgcatcagagatatagtcaccatttaagttcattgttgcaacaacatcgaactcacgtggacgagttaaaatttgttgtaagaagatgtctgcaatagaatcttttacgatgatttttccagccacttcagcgtctgccatcgctttattcgctgcatctttaccatctttttcaacgatacgatcgtattcagcccaagtaaatactttgtcgccgaattcttgttccgctacttcgtaaccccagtttttgaaagcaccttctgtaaatttcataatgtttcctttatgaactaatgtaacagaagagcgtttttcgttaattgcatattgaattgcagcacgaacaagacgctttgtcccttcttctgaaatcggcttaataccaataccagatgtttctgggaagcggattttattaacacccattgcttcttttaagaaagcaagaactttttctgcttctggagatccttgtgcatattcaattccagcataaatgtcttctgtattttcacggaaaataaccatatcagtatcttccggacgttttacaggtgaaggaacaccttcaaaataacgaactggacgtagacatacatataaatctaattcttgacgaagtgctacgtttagagaacgaataccaccgccaactggagttgtaagtggacctttaatcgcgattaaatattcacgaattaagtttaaagtttcttctggtaaccactcgcctgtttggttgaatgctttttcccctgcaagcacttctttccaaacgattttcttctcaccatcataagctttttcaactgctgcttctagtacgcgagatgcagccgcccaaatatcaggaccaattccatctccctcgataaatggaataatcggattgtttggtacattcataacaccattagttacagtaattttttcacctgtcgtcaatgtgataacccccatgtttgaaatttcatatgtatgaaactgagggaataacccctcagttcaaaccgttagtcaaattaaaatattctaatcattacatctttccgaaaaaatcagacttttgaaagcgtattttcactatcaaaatagtgttattcgcttatcgttgtgcaattggaacatacacttgatgcgttggtccattataatcagcacgcggacgaattaaacggttgttttcatattgttctagaatatgagctaaccagcctgacatacggctaattgcaaaaataggtgtaaataagtcatggtcaattcctaaacaatggtatacagaagctgaatagaaatcaacatttggtggaagacctttttcttttgttacaatgtcttcaattttgatagacatattataccatttctcttctcctaaaagcacgcataatctcttagacatttcacgtaagtgttttgcacgtggatcaccctgctcatacacacggtggccaaagcccatgattttcactttattttgaagagcattatgaatatatgactctacattttcttcttcaccaatctcagttaacatcttcattacattttcatttgccccaccgtgaagaggaccttttaatgcaccgattgctgctgtaataccagaatatacatctgaaagtgtagctacgcaaacacgtgcagtaaatgtagaagcgtttaactcatgatctgcatgaagtacaagcgccttatcaaaagcttcaatttcaacttcatttggctcgcgatcatttaacatgtacaagaagtttgcagctaatgataaatcctttcttggctcaacaacatctaaacctttacggattctcgcgtaagcagcaactaaagttccgacttgcgcctgtaatttaaccgctttcaaataattggacttttcatccataatttcagcgctctcatcgtataatgatagcatggaaattgcagttcgtaaaacagacatcggatgtgcaatttttaaatctacttgtttcaaatatgttaaaatctcacctggaactttatagtattcagatacaatttcattaaattccgctagttctttttcattaggaagcttgcggtgccataataagtacactacttcttcaaacgtagcattctcagctaaatcatcaatattatacccaacataagttaatgtatcatcaataatagagctcacagatgatgttgttgctactaccccttctaaacctcgaataacagtcatgacattctctccttttcctgaaaattctcccaatcttgctccttatatctatttgctccccttatgaattatgaacgcccgttcactctttaggcaagcaaaatgcacgatcatgcaaatttgttgcgatgttcccctcttattgtccattgtttacatggaaagcatgagcgtgaatgtctccccgaatcctcacgctcaaaacaacaagttagtgaggaaaatacattccgaagagttttatgataaaaacaacataaaacaatatcattataaaattgttttatgttgtttttattttatctggtgtaaagtctctgctgttatgtaacttttcaaagtttctaatcctattataaacaattatctgacttttgtgaacagaaagaattcaaaaattttatattactataaaattccttatttaaacatctgtataatactcataaccgcataggcaattccagccccaattaacggaccaacagcaaccccattaaatagcgcaaccgctataattgtcccaaaaacaagcgcagttgtaatgtgaggatccgtcgtcaacaattgtacgccgcctttcgctaacaaagcgaccgctacacctgaagctaaagcaatccacgcataataagatttcgccgcttctccaagttgtttaaaacctatttcccctgtcgcaatcggtacgagcaccgctattgtaatgaccgttacacctaggttaattcctttcgtttgtaaataaggaaagaccttatctcctaaaaacgtaaacttcaataaaaataacacaccaatagctacagtaagcgattggtttttagcaataagtcctataataagtagtatgaataaaaataacgttgactgactaatcatgtttgcacttcctttctgaaaataatgaactcatttccaaacaaaaatacctttaaacctatcgttatacatgctatatcgatgcctattcaacatgaattacttcattttttatgtattttaaaatgacaaactgagactttcaccatcaaaatttaagcatgtatacattttaaaaaacgggcgtctcttctttcttttctaattagaaacaggtaaaataaaaagaagagaaaatgaagtttttaccatatagtagaagcatcaacaccaagctttcacagtcactcatatactgaaaaagcaggaaaaatccatcattccactataacataaagtgaaactttaatcagtggggcattttccactgattattagccttcaccaatcgggcttttacgggcagtttatctccagctaactcctttgatccagccgcacttcgggtaggagatttactgcccgttaatgcggggtaaagtgaaactttaatcagtggagcacactcgttataagttgaacgaattaggataatccaaattggaatgggaggtatacatctttgaaccgaaacttactatatatgatattgcgactcatatttgtcattgtagcaacggtagctgggttctatgtattactatacatgtcagggcttatctatccttttattatcgcttttgcatttgcttatttgattaatcctgtcgtcaatttccttaatcaaaaactacaatttcctcgcgcactagcagtactcgttagcttaattctcgtatttggagctatcgttggacttgttacatatcttgtgactgaagcaatatctgccacaacatacttactacaacttgttacagtaaagtttccagatatcgttacattcgctcagcaatttgcacttaatcatattatgcctctctacgatgatttaatctctaaatttaatcatcttggagaaccacagcgctatacaattacacaaaacattcaaaacttaggaacagaagcaacaacacaaatgaaagaacttttaaccgccattataagcgggttaacgaatttcattagtgcactgccaacaactttaactgttcttgtattcattttattagccactttcttcattagttacgattggcaccgtcttgctcagaaagcaagaaaattgctaccgaatcgtgtacatggctatggaaaaactatttttgtcgacttaagaaaagctttgtttggttttgtgaaagcacaacttacactcgtatctatgacaaccgtcattgtactaatcggacttttaatattacgcgtaccatacgccattactattgcgattattacaggagttgtagatttactaccatacttaggaacaggcgcagtcttcgttccatgggttatatacgtatttttcactggcgataccgcattcgccattggtcttctcattttatacatcgtcgtgattgtccaaagacaaattatggagccgaaagtactttcatctaacatcggtctcgatccattagcaacactcgtcgctctatttgtcggctttaaactttttggctttttaggattaatcatcggcccagtcaccttagtactacttaatacattacacaaagctaatgtcttccatgacttgtggaaatatattaaaggttcaccttcaaaataatagtttctaattcatacacaacaaaaaacttacatgtaatcagtgggaatttcccactgattattccttgtacttatttttcatactcattacataaaacaagagaattgcactcaaaaaagataattctcttgtttttttgcatgaaaaacgcatatttcgtggtgtttttacatatttattctatttattttataattatcatttacatttattactttttatgtaaatgaataaatatacaaaatagcataaaacaagacttcaactaacaatctccgcctttttatatgaattttttacaccaatcgttcctttatatgagaaagcaaaaatttaattcagcagcgttccctccatcttattcatctaaattaatagcactaaaaaatcacaagtttaatcgaagtacacacaagaattcaaacgaaaattatatagcacatataataagcgaacgttttgttcatccccactcatcattcgccccacaccagacacttacgagcagcccagctttgagatagaaattccaccccacaaatagcgcggcaaagcaaagcttcaaccagaaagttcctctcctcttacaacacaaaaaatagcacttagatttctacaatctaagtgctatttctgaataataatagtagagttctttctaaatttccattccatccacttcataacaaacggcttcaataaagctctcgtaatagggatcacgcagataaaccctagcacatctgtcacatacccaggaagcactaagagaatacctcctacaaatacaaaaataccatctagtaccgcctcacctggcatttcccctctattcaacttagattgaatctctccaagcactttaaacccttgtcttttcgccaaatacacacctacaacacctgtaaatacaatcatagcgaacgtagaccataaacctattacatgacttgatccaattaagaccgtaatctcaatcgccggtattaaaataaacaagaatagtaaccacttcatagttctacacctctctcacaactcacttttaacgtcctcacaacgcctatatacatcatatgaaatatagatactctttcatattaaaacacataacaaacagcttttaaaagcaattctaggcgctttaagctaattctatctcgtttttgtgtaaaaaaaagagaaggactccgatccttctctccgtattacttatagcacttccgcatgtccattataaacaattccgcgtgctgcatcaactgttacttcttggccattttttaaagttgctgttacgcagtttacaccaacgataacaggaataccgattgatacgcctacaacagctgcatggcttgttaagccaccttcttctacaactaaagccgcagctttttcgattgcaggaatcatatctttatcagtgcttgttgtaacaaggatatcaccttcgtttacgttcgctacagcttcagcagctgtttttgctacaactactttaccttttgcagctttacgaccaattccttgtcctttagcaatttcttcaccaacaacgtggattttcattaagtttgttgtaccagtttcagcaactggtacacccgcagtaatcactacagtatctccaagtccaattagacccgcatccatgcctgtttgaattgctgtatctaacatttcgtcagttgaagctgcgcgcttctcagccataaatgcttgtacaccccaaacaagtgcaagacgacgtcctacttgctcgtcagatgttacagctacgattggagattttggacggtatttagagatcattttcgcagtatatccactttctgttggagctacgattgcagctacatcaagagcaagtgctgtatgcgcaacagattggctaattgcatctgtaattgttggagtgaactctttaatacgttttttgaacatatcttcatattgtaatgatttttcaacacgtaccgcaatgttagccatcattgttactgcttctaccggatattgtccagcagctgtttcacctgaaagcatgattgcatctgtaccatcgaagattgcgttagctacgtcacttgcttccgcacgagttggacgtgggttacgttgcatagaatctaacatttgtgttgcagtaataaccggtttacctaacacgttacattttttaattagacgtttttgtactaacggtacttcttctggtggaatttctacacccatatcaccacgagctaccattaaaccgtcagaaacttctaagattgaatcgatgttgtcgataccttcttggttttcgatttttggtacgatttggatgtattgagcgttatgctcttctaataattcacggatttctaatacgtcagacgctttacgtacgaatgaagctgcaatgaaatcaactttttgctcgataccgaagatgatatcttttacgtctttttcagtgataccaggaagcttaatgcttacgtttggtacgttaacaccttttttattttttacagttccgctgttaagaacttttgtacggatgtttccatcagctttttcgattacttctagttcgataagaccgtcatcgattagaatacgagaacctgggtctacatcgtcataaagaccagcataagatacagagaacttctctgcagtacctaatacttgctcagtagaaagaactacctctgcacctgttacaagctcagcttgtccgtctacgaagtcgtgagtacggatttctggaccttttgtatcaagtaagataccaactgttttaccagttttctttgaagcttcacgaatgtttttaatacgagctccgtgctcttcatggctaccatgagagaagtttaaacgagcaacgttcatacctgcttcgattaattgctctaatttttcaatactttcactagcaggacctatagtacatacaattttagttttacgcatattgcacctccgaaaattatgaaaccgttcccaaatatctgacattacgccgattagatggataattctttagataattgatacatatctttatcgattgtatgcttttgagctaacgcttcgataatgtcatgatcaacaagtttattatcttgaatacctacacaacgtccacctttaccagcaattaacaactcaactgctcttgcaccaagacgacttgctaatacacggtcttgtgcacttggtgatccaccacgttgtacgtgacctaatacagttacacgagtatcaaagtttgttgcttcttcaatgtgcttaccgatgtcaattgcacttccaacaccttcagctacaatgataatactgtgttttttaccacgttcgctaccacgttttagacgagcgattacatcatccatgtcatactcttcttctggaattaagattgtttctgcaccatcagctaaaccagcccataatgcgatatctccagcatgacgtcccattacttcgataacatatgtacgttcatgagatgtagctgtatcacggattttatcaattgcatcaataacagtgtttaaagctgtatcgaaaccaattgtgaagtctgttccagggatatcattgtcgattgtacctggtacaccaacacatgggaatccttgttcagttaattttttagcgccttggtaagaaccatctccaccaataacaacaagtccttcgataccatgtttctttaattgctcgataccttttagtcgtacttctgggtctttaaactcaggacatcttgctgtatataatttcgtaccaccgcggtggataatatcgccaacagaaccaagttctaatttttcaatgtgaccagaaattaatccagcgtatccatggtaaataccatatacttcaatatcatggaaaatcgctttacgaacaactgcacgaatggcagcattcataccaggtgaatctccaccacttgttaatacaccaatacgtttcatttgtactcacctcataaagattatttgccttataataaaataacacgaaaaaatataaaaacacaatggagaagatgtgtcttttcataataaaaacgtgcattcgcgaagaggaacgcacgcttttcttattttatcccaatggaagcgtttgaaaacgaaacttgcccaattttcatatatttttcataacgtttttcgattaattcatctttcgaaattccgtttaattgttcaaaagtttttctaattattaagtctatattttctgactgtttcaaaatattacggtgagctccaccttttgtctctggaataatttcatcaattacacctaattctttcaaatctgctgctgtaattttcattgcctctgcagcttcctttgcttttcctgcatctttccaaagaattgccgctgcaccctctggtgtaataacagaataagtggaattttctagcatatgaatgtaatctcctactccaaggcctagcgcaccaccactaccgccttcaccgataacgatacaaataactggtaccgttaaacctgccatctcaaataggttgcgggcaatagcttcactttgtccacgttcttcagctgctttaccaggataagctcccttcgtatcgatgaaacaaataataggacgattaaacttttccgcttgtttcatgagacgcagtgcttttcgatatccttctggatgaggcattccaaagttacggcgaatattttctttcgtatcttttccgcgctgatgcccaattacagttacaggcatccctttatatttcgcaatgccgccgacaatcgctgcatcatcgccaaatagacgatctccatgacattcgaaaaaatcagtaaataagtgctcaatataatcgagcgttgtcggtcgttctgcatgacgagcaatttgaacacggtcccatacttttagattgccgtatatatcttcctctaaattttctagcttttcttccaaaatacgaatctcctcactgaagtccatctggctgtttttcgtatagtctttcagttcacgaatcttatttcttagctcaacaactggtttttcaaattctagctctgccatacagccacttcccctccttgatgaacttctaaaatcttacgaagcgattctctcatatcatcacgatgcaccaccgcatctaattgaccatgatctagtaagaattctgccgtttggaaatcttccggtagtttctcacgcaccgtttgttcaattacacgtctaccagcaaatccgataagtgcacctggttctgcaagattataatcaccaagtgaagcgaaactcgctgaaaccccgcccgtcgttgggtgagtcataacagaaataaataatcctcctgcattactatgctttttcaaagctacgcttgtttttgccatttgcattaaacttaatataccttcttgcatacgggcaccacccgaagcagtaaagataataaatggaacttgtaagtcgtacgccttttcaaccgcacgggcgattttttctcctactacagagcccatgctccccattcgaaaacgagaatccattactgcaacaacaacaagcatgtcatcaattgttccttcaccagttacaaccgcttcgttcaattcagtcttcttacgatcgctctctagtttctcttcataacctggaaactcgagtggatttaatgaaaccatttctttgtcatactcacggaatgacccttcgtccaatatactatcaagacgttcccatgcattcataggatgatgatatccacaattcacacatacttttaaattttttagaagttctttcgtatacatgatttttttacattccggacattttgtcataacgccatctggcacatcttttcgtacttgttctgaaggtattgcagcgtactttttctttttcacgaataaatctcttagcacaatttgacccccttcgttgagagctaaggttagcgtaagaagaaaatggggctaacaccaaagtttgatgttagccttatcttctcaatctgtctaataacctcactctttacgtttaactttaaccgctacgcggtagaatgtttgtcataacgtgtcatggtcatttcgacaaattttatacattacgagtgaaactgtatattctctactaattcatcgtaaatttttagtgcatcattttcttgtttttcttccaaagtagcgtaaagctttctatacatatcgatagaatctcttgaaactttacaagaaagcgttgatacgtaatcatttacgatcatccaaatgcgatatagtaaataattatcgacttgttcaataagtgttttaaagaacgtttgatgaagcgttgggattgagttttcatttccttcaagtacttggtgtaatttacttagcactttagaaaacgtttctttcggtaaattacatacaattcgaatcatatctttctcgagtaatcgtttcgtttgtaataaatcacgaattgttttctcatcttgcaataagaacggagcaattaattgtacaagaccgttatcataaaagtttcgaataaacgtcccttcaccacgtctcgtttcaatcaatcctaccagttctaaagcacgcaatgcttctcttacagaggaacgtcctacgtttaagcgtgaacttaactcacgctcagacggcaaacgatcccccgccaccaatccatcctcttccataatggaacggattttttttacaatttcgagatatacttttgtatttgatgatgtcaatggaatttcctcgcttattctttaccaatcagcgctaattgttttgttttttcagcgatctcatttggatctacttgacggcgagctactcctgtctccattgctgcttttgcaacgtaagccgctacttgaggcgctacacgcgcgtcaaatggtgccggaatgatatagtctgcatttaactcatcttctgctacaagctcagcaatagcctgtacagctgccatcttcatttcttcgttaatttgtgtcgcatgtacgtcaagtgcaccgcggaaaataccagggaacgccagtacattatttacttggttcgggaagtcagaacgacctgttccaacaacagctgcgcccgctgcttttgccaattctggcataatttctggaactggattcgccattgcaaaaataatcgcatcgtcattcattgtacgaaccatctcttctgttaatgcaccttctgcagatacaccaatgaatacgtctgcaccttgtacaacatcagctaaagaaccttctatacgattcttatttgtatattttgcaacttcatccttcaccggattcatacctgtaggacgaccatcatagattgcccctttacggtcacacataataatgtcgcgtacaccatagcgatataaaagtttaataattgcaatacctgctgcacctgcgccatttgcgacaactttaatgtcagacattttctttccaactaatttcagtgcatttacaagacctgctactgttacaatagctgttccgtgttgatcatcatggaagataggaatatttgtttcttttttcaaacgctcttcaataatgaagcagtttggtgctgcgatatcttctaagttaacgccgccaaaagttggctccattaattttacagtttcaacaattttatctacatcgtttgtatttaaggcaattgggaatgcatctacaccagcaaagctcttgaataatacagctttaccttccattactggaagagatgcttcaggtccaatgttaccaagaccaagtacagctgttccatctgtcacaactgctaccatatttcccttcatcgtatattcatataccttacttttatcgtcataaatttctttacaaggttctgcaacccctggagaatatgcaagacttaaatcttttgcattttctacttttacttttgatacagtttctaattttccttgatgcactttatgcatgtgaagtgcttcttcacgaagtgttgacaaactatccactctcctcaaattattcttgctgatatcaatttctccaagtggtctgaccacgaacactactactataataatcgaagtgtagggaaattgtccattatattttcacaactacattttcttccccgacaatttcacgaagtgctcctaaacattcttcacttggatgaatcgataaactccgagataattgtaccattttatgttccttttcataataaattagtactttcgcaaaacctgaatagtcgaacaatattttcgtaacccgatttaaaagctttttctcatactgagatggcaatttcacgtaaacagatgcgtctttcttttcttcataaacatccatttcctctagcggatatagtccatttacaatccattgcagcttatgatttcttagctcaatcgtaccgtcaactaaaacaattgctccttcttgcaacttatccgagaaatgtatatacgtttccgggaagaggaccgcttccatttcatcattttgatcacagaatgtaataaatgccatcttttgaaactttttcgtacgaatcactctaacacttgttatatacacaatagctctttgtacttttttcttgtgtcgcatcgcctgagcgagagatggaatttctaattcttttgctaacttcacatattgcgctgtcggataacttgataaataaaagccaagtacttctttctctttatttagttgttcaataaaagatagctcttctccttgtacatattttgattttggaacagcatctcctaaatcacgtgcgagattcgcgtactctaacgcccctttaatacttttccataaattcgttctcgaaacaccaaaatcatcaaaacatcccgaccagacgaaagcttctaaattacgctccgttacgaactttgacggcatacggagacaaaattcaaataaatcttcgaacatttttttctctcgttcttctaataatgccgtcactgtagccattccaatatttcggatcgaaagtaaactgtaacgtatcgcattcccttctatttggaagttataaccacttctctgaagagacggcggcaaaacgtgaaaacctttccgcttcgtttctcgtatatactgtacaattttatcttcatttccaattgcgcttgataataatgccgtcataaattccagcgtatagttcgctttcaaataggcaagctgatatccgatcatactgtaagctacagcgtgacttcggttaaaaccgtaattcgcaaatcttacaattaaatcataaattttttcagcagacgtctcatcatatccatttcgcaaacatccctggacgaaatgcttacgttcctgatctaaaatatcacgattttttttactcactgcacggcgcagtaaatctgcttctccaagcgaaaaccctgctaacttcgatgcaatttgcataatttgttcttggtatacaatgacgccgtatgttctttctaaaattggctttaaatccggatgtaaatattcgatttttctttttccatgtttcgattcaataaaagtcggtatctgttccatcggtcctggtctgtataacgagttaacagctacgatatcttcaaactcattcggttttaacccgcgaagtacatttcgcataccgcctgactcaagctggaatacacctgttgtatctcctctccctaataattggaatgtcttttcatcttgaagaggtaagtttcttatatcgatttctttcccagttttgttcgcgataaattttataatattttcaagtaacgttaaattacgtaatcctaaaaagtccatcttaagcaacccaagttcttctagcgcatcggctggatattgcgtaacataaacatcgttatgtccttcttgaattgctacactgcctgttagcggttcttgactcataataacaccagccgcatgaatagacgtatgacgtggtaaaccttctacacgttttgcgatttcaaacacacgctcatgcaaaagattcccttgtataaactcacgaagtgattgtgattcttcatatgcatcttttaacgttataccaagctttgatgggataagttttgaaaatatatcaatatctcgcggcggaagccccattacgcgggcaatgtctctaattgccgcttttgctgcaagcgtaccaaacgttacaatttgcgcaacacggagctgaccgtatttatctttcacatagcgaatcatctcatcacgtcttacgtctggaaaatcaatatcaatatcaggaagcgtcacacgttcaggatttaaaaacctttcaaataatagatcgtattcaattggatcaatatctgtaatttctaatacgtatgaaacgagtgaaccagctgccgatccacgacctggtcctgttagaatatgattttcatgtgcatacttcataaaatcccatacgatgaggaaataatcactaaatcccatacgagaaataacatttaattcatgatccaaacgctttatatgcacttctttcggttcaccatatcgtttccgcaaaccttcttcacaaacacgacgcaagtatatatcactcgtttcattagacggaacaggaaacttcggaagttgatttacatggaacggtatttctacttggcaacgctctgcaatttttattgtattttggattgcttccggcgcatgggaaaatagtgcttccatttcatccgatgactttaaataatactgatctgttttcagcctcggcctatctggatcagtcattttcgttccactttcaacagatagtaaacattcgtgaacaagcgcgtcactttgattgatatagcgcacatcatttgttgcaacgactggaatattaaccctactaataaattcaggtagtttctcttgtaaaagcaactcatcttgaattgcatgatgctgcaaactcatataaaaatggccgaacatattttgatacgtgcgagctacttcttcagcctgactctcattgtcttctagtaataattgctcaatttcgccatctttacctggcgaaatagcaattaatcctttcgcataatgcgcaagccacttcttaggaataccttctttggactttgtcataatactgctagaaatctttaataaattttggtagcctatttcattctcagcaagtaatacaagcggataagacctttcttcttcttcactaaaaatagaagcggttaatccaataacaggctgtataccatgtttcttacatgctttataaaacggaataacaccatacataacattttcatccgtaatagctagcgatgaaaaaccaagttctttcgccctgactacaagctcatcaattttacaagcactttttaataaactaaaaacggtttgacattgtaaatgcacaaacttcactgttgtaccctctctttacctatttgactacttttattataggtgatgaggaaagcggaaatcaaaacatacttcttatactttgtccatatatatgaagaagaaaggggaatgacgatggatgtaagagaacatacttttttctctctgcttattattagttattttattgcctttggggttatacttggcggttcattaattggtggatttggtgcgtttcttatcggaaaaccagctctaacttacattaatcaattcgcccaaaatttaagaatttgggcactcgttgcagcaatcggcggaacattcgataccttttatagctttgaaagaagtttctttggcggagatatgaaagatatcgtaaaacaaattctccttatttttttcgcaactggtggtatgcaaacaggtctcattattattaaatggctaacgcaggaacatgtatgagagtaccaagtgccaatacagcaaaaagatggtacttagtattagctggtgctgctgttggaggcgtgttgagctggtttatttttttgtacatatacggtgtttttcaacaagaacaagctagtaaaatagcagaacaaagagaaattatagaaaaacaagaagcaaagctccacgtccttctcgaagatcaagaaaaattgaacactgaaaataaacggctcttaaccattcaagagattaaaataaaacttatcaatcgagaaaaatacgatttagacaatcttacactcgaaaatatgactacatctattcataatgatctccagcatcttttaacgaaaaacattcaaagtatcgcaaaaaataaagacctactaaaaaaggtaatcgaaaataaaacatacaaacattacgatcgcctataccgttttaaagtcgatacaatatcttttgatacagtgcttgaaattagcattactatagagaaagaaaaataaagaaggagggctttagcgccgctccttcttttcgttctaacatatagtcttttatttacaaatctcacgtaaatcagcaaaaagacgatccgcttcttcccaagaagatgccttggcaccagaagccatcggatgccctccgccgttatattgcattgccaatttgtttataactggtccttttgaacgaagacgaacacgaattacgtcatcttcctctaaaaatagaacccacgcctttaatccatcaatattgccaagcgctccaacaacaccagatgcttcagaaggaagtacatcaaactcttctaatacttctttcgttaatttaatgtaagctgctccttcttctaccatcgtaaagttttgtaaaatataaccgtttaaacgagcaattttttcttttgtcttatacatttcattgtataaatctgtgaatttcacacccatatcaacaagctcacttacgtaacgaagtgtttttgctgtcgtatttgggaataagaaacgacctgtatctccaacaattcctgctaaaataaggcgagctgcttcttttgttatttttaatcctttatcttttccatagttataaaactcataaatcatttcacttgtagaactcgctgtcgtgtctacccacgtaatatctccatatggatcttcatttggatgatgatcaattttaattaacatcttcccttttgtatagcgttgatcgtcaacccgttcttgattcgcagtatcacaaacaataacaagcgcattttcgtatacactatcttcaatatcatccattactcgtaagtatgctagtgacggttcattgtacccaaccgtataaatatttttctctggaaacgattcttgtagaattgtaccaagaccaccctgtgaacctaacgcatctgggtccggacgcacgtggcgatgaataataattgtatcaaactctttaattgctcctaaaatttgctcatgcatatgtataatctcctttttaatcaacttcttcactttatcctccattataacggaaagtatttcattcatgcgaacaattgctttataataaaagttagaaagtttagatatttctttttcttttctattatttttcacaaagcgatgggagtgttcactatgccagtattagtcttctgtattatcatctcatttatgttgtacctcttttacaaaacaaaatactttcgtacaaaccgcccaatggagaaaggttggctctcaggaaaatccgcaatggcactcggttcattcgttttatttttcgggataaaccaattctttttagaactttcaaccgctcgtattatcgttggtgttttattcgttctatttggtagtgcaagtgtatttaacgggtttcgccaatacaaacatttcttgccattagcagttaaagaagccgaagtctatgaagcaacataaaaaagcatcaatattgtgatgcttttttacgtcccttaactttcaaaatcatatatgcaacaaacgcagatggtatattaaatgggttaccttgtacatgaaaatgtagttgttcttctccaaaagacattttttcatatagctctcgctgagataatcctgtcttttcctttttttcatgtaaaccttgtaaatataaatattggatcggtatcattacaagaaagtaaaatagtgcgatactaccaaaaaagagtacggctgacgacataatgcataccacctttcagaattccattttcttacaatataatcataacacaatatacaactaaattgaattactattctgtcttttcttacgttacttttccactccactccatacatatttcactaaaactcccatctaaaatcatgcctttcaaatttaaaacaacaaaaaaagatggaacaaatcaaaacgatttgttccatctttttatttatcgattaactgcaccataagtaatgcctttccaacaacattaccttcatgatgcacctctacatcgaccttaccaaatttacgcccaatttctaatactttcggatgaacagatacaacattatcaatttgaaccggctttacgaaataaatcgttaagttttcaacaattaaatcgcttttcttttgcgcacgaatgacgcgatttgtcgcttctgtcacaattgttgcaaatacaccgtacgataacgttccgattgagttcgtcatttgcggcgtcaccgaaaattgatatagatgctcattcttcgcttctttcggcgtcataaattgattcgttacaatatcatcaatggtttctccaacttgtggctgccgttgaatcatttgcagtgcctgaagtacatcttgacggctaataataccttgtagtttatttccttcatcaacaacaggaagtaactcaataccttcccacaccatcatacgtgccgcagctgcgacagacattttaccgttcactgtaattgggtgttttgtcatcactttatcaattggtgtttctttcgctacaccgatcatatcttttgaagtcacgattcctagcactttgttactttcatcaacaatcggataccttccgtgcatcgtctcttcattataggcatgccattgctgcactgtatcatttggctttaaatataacgtttcttcaattggcgttaaaatatcttcaacgagtacaatttctttcttaataagctgatcgtaaatcgcacggttaattaacgttgcaactgtaaaggtatcgtaactacttgaaataatcggcagttttaattcatctgctaatttcttcacatgatcttccgtatcaaatccgcccgtaattaatacagcggctccagtttctaacgctaattgatgtgcgttcgtacggttaccgacaataagtaagttcccagcttctgtatagcgcatcatcgcttctaatttcattgccccgattacgaatttatttaacgttttatgtagtccttctctgcctccaagtacttgaccgtcgacaatgttaacgacttctgcatatgtcagtttttcgatattctctttcttcttttgttcaattcgaattgttccgacacgttcaattgtactaacataccctttattttctgcatctttaattgcacggtaagcggtcccttcacttacactcaaatctttcgcaatttgtcttacagaaattttatggcctactggcaggctattaatatgttctaaaatttggttatgcttggtagccaaatggtttcaccatactttcttttccctaaattcttcatgtgttgtactttcagtatactatattttcaaaactgttacactctctctttgcatacctgtactattttttttataacaaaatgactcttacattccaccagtcattctattacaacaatgtaatgctattgtcatctcattcgatagttcgcacacttgattacctatacaattaagacaagaaataaaacaaaggagcgaacacatgatgaaaaaacttttagaggttgtaggtgctgtatttttagctttcgtagatgggaaaaaagttacaatggaattgaatgaaacacctgagcagccacgtaccaaaagaaaagaatcaccaaaacaaatacaagtattaaaagctgtcctacacacgtaaaaacccttcacttttcttttcaaatgaagggtttcttttctatagtgtaatactttctccagcttctaatactttccctgtacaattttgtagcttttctacaaattgatatggatcttgttcaataactgggaacgtattgtaatgcatcggtacaacagttttcgcattaatccattttgccgctagtacagcatcttctggtcccattgtgaaattatcaccaattggtaaaaatgctagatcaactttatttaattccccaattaacttcatatcagagaatagtgcagtatctcctgcgtggtatacagttctctcttctgctgtaaataaaatacctgctggcatacctgtatatgtaatcgtcttattttcttcatcaatataactagagccgtggaatgcttgtgtaaacttcacttttccgaagtcaaattcatgtgaaccaccaatatgcatcgggtgtgtatttacaccttgccaacttaaaaatgttgctagttcaaatggcgctacaacaactgcattatttttcttcgcaagctctactgtatctccaacatgatcaccgtgtccatgcgataaaaggattgcatccacttttacatcttcagcttttaaatctgttttcggattacctgttaaaaacgggtcaattaaaataactttttcattcgcctcaattttcacaactgaatgtccatgataagatactttcattattacattcctcccctattcacattctcactttttattctacatgatttttcaattccctgtcttttctaacatctatttacttgtcataacactttcttccgagttaaagttatatttgtaattaaatatctcgggggtgccaatcgatgaatgctagattagaaaatttaatgcaatggctaaaagaaaaaaacgtagaagctgcgttcttaacttctacaccgaacgtcttctacatgacaaacttccactgtgaaccacacgaaagattacttggtatgtttgtattccaagaaaaagaacctattttaatttgccctaaaatggaagaaggtcaagcgcgtaacgctggctgggcacatgaaattatcggatttactgatactgacagaccatgggatatgattgcaaaagcaattaaagaccgcggcatcaatgcaaatgcagttgcaattgaaaaagaacatttaaacgtagagcgctacgaagaattaacgaaattattcccaaatgcagctttcaaatcagctgaggagaaagttcgcgaacttcgtttaattaaagatgaaaaagaactttctattttacgcgaagcagctaaaatggcggactatgctgttgaagttggtgtaaatgcaattaaagaaaaccgcagcgagctagaagtattagcaattattgaacacgaattaaaaacaaaaggcatacataaaatgtcatttgatacgatggtattagcaggtgcgaactctgctcttccacacggtattcctggcgcaaacaaaatgaaacgcggcgatttcgtactatttgatttaggcgtaatcattgatggttattgctctgatattacacgtacagtagcattcggtgaaatttctgaagagcaaactcgcatttacaacactgtacttgctggacaactacaagcagttgaagcatgtaaaccaggtgttacacttggcgcaatcgacaacgctgctcgttctgttatcgcagatgcaggttacggtgacttcttcccacaccgcctgggtcacggacttggaattagcgtacacgaatatccagatgtaaaagctggcaacgagtctccattaaaagaaggtatggtcttcacaatcgagccaggtatttacgtaccaaacgtaggtggcgttcgtattgaagatgatatttacatcacaaaagacggatcagaaattttaacgaaattcccgaaagaattacaatttgtaaaataataaaaaaggcagcgggattgctgcctttttctatttctctactatttcaaatttagcaccatcttctcctcatacttatcatcccatttaatcacaacttctataggttcatctttagagataggcgcgcaacttacacaagaagacttcatttcaatctttgctcctctatgaacttctgacgtttgtgtcattgtactaaaggctccattaatagcaatctctaagtttttaaattctgtctttccatccccgcccttatattgaaacgtaaacatcccatcttcactgtcatccttaatatgccctttatattgtccagtccaacttttgctctcgctagaaaaagtaacatacgaaatggaacagcttcctaaaaagaaaatactaatgaaaaagaataatgctctcttcataatgcccccctccattcaaaagcatttatttattgtctatttcttcctcttattatactattaaaatacagaattttctaaaataggtggtttatatgttacaacaacagttagaagaaattcgtaataatcattacgtaatggatacaattaacatggattctttaatttccaatatgcttaaacatatcggtgttaccgatagctatttaagggacaaacttatttgctctactttttaccatctcatcaaaaaggactacctttcacacacacaattacagaaactattattagaaagcatcagtgacaaatatttattgtataagattcattcggatgacgaagatgcggtatttacccgtgcatttacaacattattaattgcactcattattgatgccgatacaaatcataatttcttatcacaggctgatcttttacatgtaaaagatcgattagtgttatatatgaacaacgagcatgatttccgcggatatgtgcaagaccacggctgggcacatagtatcgctcacgcttctgatacatttgaggcgcttgttcgtagtcctaaactggaaactttatattacgaagaaatattacaaactttattaaacaaagtttgtgtccattctatttactacaaatatgaagaagacgaacgtctcgtttatccgattgtcgcaatgctacaaaatggtctaaaggaagaggtactcctattagcccttcatgaattagtagctcaattacccgtcaaaaaacagacattacatactgaatcgtacgagtacctatacggaaatataaaatctttcttacgtagtttgtttttccgactacgcacactgtctatatgtgaagaaaccgaatgcaaaattgaaaaattgctgcaagaccttccaaaatattattaaaaaaagaaggccacttagaaagtgccttcttctatttcactaatatttaattgaaatttcacgatccaaactgagaaaaggtggacaagaagcgcaaacgccatacatgctccgcttaaaaaagttagtataggatgcgaatacacgtgccccaatccataggatatcgccacgaaaaacattgttatgtaaatataaattgctccatgtatttgcctcatataaacctccttttcccatattataacataagttttctgattattcacattaattactcgtaatcaatatttctcaactgttacacctcttacagcagccttaatatacggtgacccttgtaaactttgtaaatcctctgttttcctgttacgactacaccgtatattggtaagtcttttgttttggtgttttttatttctttatcccgcattaacaggcagtaagacccccacatcaaaattcagcggaagcaaagaagttaggggggggcggactgctcgtaaaagcccgattggtgagggctgataatcagtaggggatgccccccccactgattaaagtttcactttatagtttatcctaaaatattctcgatatccctctttattttcacttaaagatatccaaatacagcttttataaatttttccataataaaaagcacatttattttgatgtgctcttcacatataatttagtaaaatatgaaccatttttttgaaacaaaaactcccactcatctctccccatactatcgttatgacttagttgccataataattgaacgaggataaaatcccagcttttcataaaatgatacagcttcatttccatacactactgttaattcaatttcatctatctttttcactttaaaccattccactgcactattcattaatttcaaaccaaatccgtttcttcggtatttttcatcaacaaataaaacttcaatctttccgcttacgcttttactatacgctatacaaaatcctaatatattatctgtttctgactcaatcaataattcaattctatattctccgtactttgagttctttttataattttcaatacgttcctcaaatgtcattcttgggtaatcgccagaaaaatattttgatttattattatgatattcatgcaatttatttaaggattctcttattatctctatttcatcgagagtgatatatttattactaattctcatcctatagcatctccaataatatatatttcagcaaaaaaataagactgttttttgttcacaaaatattactctattactccatcgcttccctcacaacatcttgaatcataacaacttctgttttcatatcaatagacattgcttcttcatcaatacattcataccaaaacgctaagtgctttttatcgatttcataatgagaattttcgacaagagccccgccttctccttgcacagaataccaatataagtactcttctccatctcttatttcccggaaaattgtctcaacgtacatcttttcgtcgtttaatgtcaaaaggacttctttcatattgtcattaagaagctgcatccattcatctactcgatgactcttaccaggcttaactttaaatctcgttaattccacattcatttttattcccccgttttcttacttacaaacaatctatattctatcggattatgaaaacttaatttactagctagtttttgcgaaggaatattgtctacataacaatcccagcacggtgtaatatcattttgcatgcaatgctcaacgaaccgtgtcgcaacagcttgagctaatccttttccttgatatgcttcatgtgttgcgatatctatttcagcataaccattcccgctaaatattgagacacattcagctacaattatcccatcttgttctatacaaaatccaaaaccactattcaaaaacgtttcttttgatccccaatatcctttgtagtactcctctgtaaattcactgcttcgttctatatcacttttatcaatacgcttcactgcatatgtatttttatttgcatcttgtgttcgctcttcaaagatttctctttggaatttcattcgtggcatattccgaagtacattactaaaacacccttcaatcatcatttcccactcttcacttgaagcgaatagtgtaaatctcttctctgttttttcaatagccatttttaaatacatcaataaatcttcattataattttgatcatccgtatgaccaaataaataatagataccgttaactgtacgaattaatcctgctgttaacttctcgttggcaaaaacctcaccatctaccatttgatcacataccgcataagcaaatgtcgtcgttcttgtattactttccaaaatcggaatgatttttctatactcggctacagataattttttcataattgctccactataatcgtatcagcctctatatgttcaaaacaaagatttaccgtcctctttaatgctctcgttctatgaatcgtacatgctggaattaaaatagaatcatttggctttaaaaccgccgtttctccatcttcaaaatcaataagtaactctccctctagcacaataaataattcatccgaattagaatgatagtgccaatcatattcaccagtaaatacagcgatgcgtaagcaatgactgtttatgtttgaaacgacgaagtttttatgttgatcttgaatgtcttttgttaattctattaagttcacagtttccatatttcatcccatccttccattagtcgttcttctgaaaaaccaacttagtctccaccacctccgcaatctcctccgccatcacttgagctgctacaatcgttgctactgtagtcaccgaatccacttgatgagcttgaattggatgaagattttttgcttctttttctatcttttttactttcatgactaggccaaaccttatcaaataatataaagaataagattccttctaccataacaagcataacgccaaaaataccttcaataacattaggtgttatccccaaacatttaaccatcccacataaaaacacacaaaaaatcacatacaagaacatacaaatatatcgaaatactttttctatcataaggactactttttgtgaaaaaggtatgttctgctcctgttttttctttatgtacttttgtctctttgcttgctttttcttcctctttttactccccattgaatcccctctttttattatataattctaaattatcataataaaaaatgatttacaccaataaataacaattattcacatgttatttctccataaaaaaagaccctcctcataaaggaaggtctcgaatgtatttctattatgataaagcaggagctttttcaagaagctctttcgcatcagcgtattgtaagccgtgcgcttctgcaactgcttcgaatgttacatagccatctaatgtgttaataccttttagtaatgcagtgttgcctaagcaagcatctttgtaacctttgttcgcaatttgtactgcatatggtactgttacgtttgttaatgcaagagttgacgtacgtggaactgcacctggcatattagcaactgcataatgaacaacgccgtgtttttcgtaagttgggttgtcatgagttgtaatacgatcagttgtttcgaaaataccaccttggtcaatcgcgatatctacaacgacagaacctggttccattgattgaatcatttcttcagttacaagttttggcgcttttgcacctggaattaatactgctccaataacaaggtcagattctttaacagcttctgcaatgttgtatggattagacattaatgtttttacttggttaccgaaaatatcatctaattgacgaagacgttctgcacttaagtcaatgattgttacatctgcacctaaacctactgcaatcttagctgcgtttgtaccagcttgaccaccgccgatgattgttactttgccgcgttttacccctggaacgcctgcaagtaaaatacctttaccacctttgtttttctcaaggaattgtgcaccgatttgtgcagacatacgaccagctacttcactcataggtgcaagtaatggtaaagaacgattgtctaattgtactgtttcgtatgcgattgatgcaactttgttatcgattaatgctttcgttaattctggttctggagctaagtgtaagtatgtgaataaaattaaaccttcacggaaatagccgtattcacttgctactggctcttttaccttcataaccatatcttgattccatgcttcttcagcagtttctacaagtttcgcaccagcttgtacgtattcttcatccgtaaagccagatcctaaacctgctcctttttgaacaaaaacttcatgaccattttgtactaaatgtactgctcccgctggcgtcattgccacacggttttcattgtttttaatttctgttggaataccgatacgcatgattagttcccccttgagttatgaaatgacccctgaatcatttttttaaagcgctttctacgctcttatattttaacataatatctcaatatttgacaaaaaaataacacgagttttccgatagatttaattttatattaaaggacagtattatccgcacctctcagcacaatggataaactgtccaattattcgaaacttcatcttattttattctatcgatgtctatgaataacatccactgcaccagtcacttcaataattgtaccggtaatcatatcggaatcgtcctcacataaaaacgaaatggttcttgcaatatcttcacctgttccagatctaccaatcggtgtgttatgctctttcagctgacgtgcttcttgaatagttgcctctttcatctcgcctataatatcaccaggacataccatgttcgcagtaataccatactccgcttcttcataagcaactgttttcgttaatgaaacaagtcctactttcgctgcggcaaaagctgaacgataaatccatcccggtgcactatccgccccttgaaatccgtaattaataatacggccaaagttctgttttctcatgaccgggacgacaagttttaataaatgaaataccgctgttaaattcccctgaatcatttcattccattcatcttcttcataatcaactaacttttttcgttcaaatacatatggaccagcattattaattaaaaagtcaattttgccaaaatggctcatcgcttcttctactattttatgtaaatcttcctttttcgtgacatccgcttgcacgaattgtagacgctcttccacatctttatatgtttctttcatcgtttccatagccgtggtatcgctatggtacgttactgttactgaatagcctttagccaataacttttctgttacttgctttcctaaacctttcgtaccggctgtaatgagcgcatgtctcacaaaactgcccccttttaaattgctatacttcatatgtaacaagttctcgctccaattacaactaaaatgaattgaaacagagttttcaaaattctgtaacgtttctggcaagcacgttaccaaaatttgttttataattaagttgtaaacagttataaaacagattgggaggaatttactatgaataatacatatacaaatattttaatcgcggtggatggttctaaagaagcagaaaaagcctttaaaaaagcaattcaagtcgcaaagcgcaacaatgcaacattaacaattgctcatatcgttgatgtaaaagcatactcagcagtagaagcttatagccgtgcaattgctgaacgggcaaatctatttgcagaagacttattagaagactacaaaaaaactgcgcttgaagctggtcttgaaaaaattgaaactgtattagaattcggtaatcctaaatcaaaaatttcaaaagaaatcgctccaaaccataaagtagatttaattatgtgtggtgcgactggtttaaatgctgttgagcgtttcctaattggtagcgtctctgaacatattattcgctatgcgaaatgcgatgtccttgttgttcgtggtgatgaagagcaaggtgagctttaatttatagataaaacaccaagtccacataggcttggtgtttttcatttcataaacttcactataaacacaagacatgctacgacaacaacggtaattgccaacacataaggcggaagaaacttcaaagaccataacgccatcatgattgtcgcgatcgttaagtacgtttgctttgcaccctctgtcatttttttacgaagtaagaagacgtacaaatagccgattggcggcgtaatgaagcaaagaacatatatgatttttgattttaaataccatttttgttctccaagtttctttatatctccttcaattctcttactctcttgttctttcgcttcttctacaagcggattttcctcttctcctcgcttttctttcatataaggaagaaagtgcataaaaaaaatagtatgcgaatacgaacgctccaaatccaatatttaatctttctaatggaatatgttcactaaaaaaagcagcagtaagcactaaagacaaacagtatgtcatcatccaaaatgaatgttttctctttttccgttccatttctttttcaccttgtatatcttttcttttcgaaatccatatagaaataaagcaatctactacaaatagagcaaaaataaatatcgcaacgtgtactgtttctaaatcctcaaatgaaaagatatttgggaatgcaacgtgtaatacaattagcgtgtacaaaattaaccctataaaataaatacgtctcatttttcatccctttcttatttcctaacattacgttaacatacattttttagaaatagacggacaaaatatatatgtgtaaaaaaggaggatgcaacatggatgattctgaacgtattattttagatgtgaatgggaaagaactcgaaatgctagatacgattcgtactcattttaaagagaaacatggcgttgaactaagtaacggtgcattacttagagatttgatggatattgagtatattcgaattacggaagaacgacataagtatgattaaaagaaaaacgactgcaggcgaatgccatcagtcgttttctttctttatttaagctcttgatgcttcccgcccataccaccttgctcattgctatcttggtgtacagttagtttatttgttttcgtatcttttaaaactctatatgtatatgattcatttggttcatctttaaactgcacattcattccatacgaatccattttgctataaaaggccggttttatatataaaatatcactttctttatatcctttatcttgcaaatgccacatcgttgcgataatcgcttcttctcgcttttctttttcaccaacatacatatatttgtccaaaagaaacactttagcatttgcaattaaactaattaccagtacaatgataaacactatttttttcatagacttcccctaaattgttattttttactatattgtaacttaaatattattaaaaaacaaagtacgccagactttactagactggcgtacttcccaactcaattcttaataaattctttcgttaaccccttcgccttctccaaagcgtttttgatttgttcaaatcctgttccacccgaactattacgacgctttacagccgcatatggtgaaagaacttcatacaaatcctcttcaaataaagagctcatttctttatatgtttcaagcgagacatctaataaataaattcctttttgtgtgcaatatagcactaacttcccaacaatttcatgagcttgacggaatggtagtcctttgtttgctaaatagtcggcaatttctgttgcattggagaaatcttgcgtcacagcttgccccattttttctttgtttacagtcatcgtttcaagcatgcccgccataatatgaaggcatccttctactgtttttactgtatcaaacattccttctttatcttcttgcaagtctttattgtaagcgagcggtaatcctttcattactgtaagtaaactgaataaattaccgtatactctgcctgttttaccacggattagttccgccatatccgggtttttcttttgcggcataatgctgcttccagttgcgtattgatcgctcatttcaataaattgaaactcttggctactccataaaataagttcttcacaaaagcgcgataagtgcatcataagcatagatgagttacttaaaaactccaagatgaaatcacgatcgcttactgcatctaaactattttcatatattccattaaatccaagaagctccgcactatattctcggtcaatcgggaatgtcgtcccagctagcgctcctgctcctaatggggagatattaatacgctttaacgaatcttcataacgatttacatcacgctctaacatccaaaagtaagcgagaatatgatgagcaaatgaaatcggctgagcacgttgcaaatgcgtatagccaggcataatcgtttcaatattattttctgcttgatgaacaagaacagtttgcaattgttttgtagcttttataatatgttctaccttttcttttaaatacaaatgcatatctgtcgctacttgatcattacgacttcggccagtgtgaagttttcctcctacttcgccaatttgttcaattaacattttttcgatgtttaaatgaatatcctctgcttctactaaaaattgtagcttattctcttttgcttctttcaataaatattgaagacctacctttattttctctgcttcttctttcgtaacgatgccttgctttgctagcatcgttacgtgtgcaatactcccgtttatatcttgatttactaattgttgatcgaaagagatggatgctccaaactcttcaacccacgcttccgcttcttcagtaaaacgtccgccccaaagtttgctcacgcttccaccttcttttgattcacttggctgtatactttcgtcggtaaaccaaataatgaaatgaatccaactgctgcatcatgattaaattcgtcctgggcagtatatgttgctaatttttcatcgtataaagagtattcagatttacgtccttctacaatcgcatgacctttaaataatttcacacgcactgtacctgttacattcttttgcgtttcttgtaaaaatgcatgaagcgcttgttttaaaggtgagaaccataaaccgttataaataagttctgttattttctgttcaatcactggtttaaaatgcgctacttcttttacgtgtgttaaatcttccaactctttatgcgcagtgattaacgtcattgctgctgggcattcgtatacttcacgagatttaataccgacaagacgattttctacgtgatcaatacgtccaacgccgtgttttccagcaagcgcatttaacgttttaattaattctgcaagtgaatatgcagtgccatttaaagtagtcggtacgcccgcttcaaatccgatttctacaaactctggtttattcggtgtatcttctaacgctaatgtcatctcatatgcatcttctggcggcgctgcccatggatcttctaaaattccacattcgttgctgcgtccccataagttttgatcgattgaaaacgggctatctaaattaatcggaattggtacatcgttttcttttgcatatgcaatttcttcttcacgtgaccatttccattcacgtacaggcgcaatcacttctaagtaaggatttaatgcttggatagaaacttcaaaacgaacttggtcatttccttttcctgtacatccgtgtgcaactgcagttgcgccttcttgttctgcgatttctactaatttcttcgcaataagcggacgagataatgcagagacaagagggtattttccttcgtataatgtgtgtgcttgcatcgccatcaatgcatattcgtttgcaaattcttcttgaacgtcaatcatatatgatttaattgcacctactgaaagtgccttttcttttacaaatgctaagtctttaccttcccctaagtctaaacaaagcgcgataatatcataattcttctcttgtaaccatttaattgcaacggaagtatcaagacctccggaatatgctaatacaacttttttcttctccattttgcatcctcctaaagaataaatattcattttcttttataataattcacactttaacacctttcacaaaatgtatcaagagtcattttcaaattttttcaaacaatttcgtcgaacttctttctgtttttctgtacaatataagcaggaaaacgggggtgaacttatggaaaagtatttcttatacgatgaacatctaggaattgaaattccacatttacaagaagactgggaagaaatccccgaaaaaatgcaacatgctattttactaaaatgggaacaagttcgcgggaaaattcctgatcgtataaaagaacttgagcactatattaataaaaaacaacattatttaaataacgaagaagacttcgaagtttcttgtaaactaaattcagaaattgccgatcttgcttccatcattaatgacctttggctttggtatcgactcactcaaaatgtatctgaggggaaagcacacatgcccatcaacttaagaatttgcactacccccaagtgtcaaaaaacgttattctggggaatgtcttataaattagggaggaacaacttcaatacatatactataaaagatagatgtgacctctgtgtgaatatagagtgaaagagagagggagttttaaataaaatgaaaatttaatgagtgttttttgttcatcccctgttgattattagccttaaccaatcgggcgtttattgcccacaaatagcggaataaaagataaagcaaacaaaaaataagaccatcatttataagatggtcaagggaaggggacaatttatgtcaatttaattagggatggaagctattcaaagacactggggaatgtcttataaattagggaggaacagcttcgatacatatactataaaaggtggatgtgacctctatgtgaacatagagtgaaagatatggggatttgaacaatagtacatatgaaattgttattgctagcaatatagaattaggatatagagttttccaacataaaacgaaaaggaatctgaatataaataaaagttgtaatctatgaaaaaaaagattatgctcaactatattatgagaatataaggtttgtcccaattatttaagggcttttaaaaagctttttattgtatgaggggaagcttcactttaataagggagttaatgatatggacgtaacaaaaaaacaagggctgtataatcgtcttatacgattaaacccaccacaaatattagcattaggctttttctgcttaattgtggttggcggtttgttattaaaattaccattcgcaacgaaagcacatattagttgggtagatgctttctttacagcaacgtcagcagcgaccgtaactggtttgggagtagtggatacagcaagtacatttacgatgtttggcgaaattgttattatgtttttaattcaaacaggtggtctaggtcttatgacaattgccattttaattgtttgggtactaggtaaaaaaatcggattacgccatcgtttattaattggagaagcatttaatcaaacaaatataggtggtcttgtaaaattagtaaagcgtgtctttatattttcgatttgtattgaacttattggggtcatctttttatcgtttcgctttattccagagtttggttttggaaaaggtttatactatagtatttttcatgtaattgcatcttataataatgcaggatttgctttatggccagataatttaacaagatatgtaggggatcccattattaatattgggatttgctctttaattgtaatcggaggactcggttttaccgtattaattgatatatggtatagtcgcagttttcgaaaattatcacttcactcaaaaataatgattattggaacagtagtgctaaatgttatagcaatgattgtgatttttgtattggaatataataatgtgaagacgttagggaatttatctttaaatgaaaaactatgggcttccttctttcaaggtattactccgcggacagctggatttaatacggttgactatggaggtatggaagaatcatctatattatttacgatgattttaatgtttattggtgcaggaagtgtatcgacaggtggaggaattaaattaacgacgtttgttatcttaattacatctgtcctttctttctttagaaaaaaggaggaaattgttttatttcagcgtacaattaaaatgtcgacagtaacgagggcattagcaattgctgttgccagtcaaatacttattttagcagcggtattcatattaatgcttacagaaaacttcagctttattcaattattatttgagacaatatcagcgtttggcacagtcggattaacgatgggaattactgcacagctatcggcattcggaaaatgtattattatgtttgttatgttctgcggattaattggaccattaacacttgtgttctctttagcgcgaccagcaaaacaaaaaataaaatatccatcggaagatgtgtttacaggataaggtatcccgcgttaagcgagatacctttttcttttttagaacagggagaacaatagaccaataagtgctactcggaataaaattgcgataagtgcagcaattccaccgacaactgcagcgataccgccagttacagtagctccgcgattataagcgtaaataccgagtaaaacagaaacaagaccaaatagtgttggaaatgtaaatagcgataagatagatagcgcaagagcgataaaaccagcagttgatccagcagcggacgattttacaacatctttatcgtctttatcatcgtaatcataatcaatgcgttgtggtgcgacctcagcggcgtactcttctttatagtcactataatcactatctattctatctctttttttataatcatcaaatttctcagtcaaagtcatgactcctttcataacaaggttcaatagtagtatgtatctctttttcttttttatcccgctatttgtgggagtcgagctacgtacacatcccactgattaaagtttcactataccggagcatgtacagggagtagtatcttttaaaagaaggaaaatgtttttttaaaataggaaaagttagtatgacttcctctattttggaaaatataaaaaggaataatgaggaaagggtgcaatacataatggaacatccaattgaaaatttaatgaaaacggcaatgacaaatttaaaagagatggtagatgtaaatacaattgttgggagcccggtttcaacagctgacggaaatgtagtattaacagtatctcaagtggcttttggttttggagctggtggaagtgattttaaaggggatttcatcactgaaaaacataacggtgggcaaaatcagcataaagagaacaaacaagggcatccatttggaggaggaagcggggctggggtttccattagtccagtagcttttttagtagttggttctaatggggtgcaagtattacatctcaacagcagtacacatttaattgaaaaggccttaaatactgtaccaagcactgtagataaatttgtgaatggtcgtcaaaagtgaacttgcattttttaggaattatgatatattagaaaaagtgcgctttaggatgatcggaataattgaaatgtaaatatatatgatgtgtggaataagggagaggaatttatgattaatatcaaaaacttagtagttggcttatttatgttagtaagcggctttgttgtatatgtaataaaagaaaaagctccattttaaaacagacaaaccgttaatgtctgtttttaatttgcggaaaaaagttgacaagttattgtattggtgttaagattttaattcgtgtctcggttacagctagtgtaaagtaaatatctcttatgaatgcaatacgaaaagtttgcgaaagatcgggtaattttatcaacaacttttgtgaacaaaccctataaattgtatttgtaagctatatatgtatactagtgaatcaaggagcggtcagtggaaccgtaatgatgagagagaggtagggctttcatccagtatatgttactttcccgttaggtgaatataaaaaagaggactccttttaaaaggggtcctcttgcattttttaagtgcgactttcaacttgttgacaaatttcatccgttgttaaaccgtgagctgtaatgactgatcctttaattgatgtatctgcaatgcccatcacattagaatcttgcccagttacaacgcaacaatcacacccttgtgcatcctgttctgagttaagtgtaacaacttcatgaccttgttgttgaagagcttgttgaacgtctgttaatgagttttcaacgccaattctagccataattatcacctcctaccatctaattgctagtatgctcaagttcactgcatatatttatgaaaagacggtaggaagtaaatctttgtttagtcgttatatacgccagtaagcatttgactaacgaattgatcgtttaatgtatcttgtgctgaagaagtatttgaatggatgtcgattgaagcaataaaatgattatgttctttcgtatttggttctacctctacgtaattatcgaatttacaaaaacctttcgtatccattagatcaaataattgcagcatttctactacctcttgtctcgttcctttaatttgtacacacgccatatttatttcctcctttattttgacaaattgttttttaaaaataggattatgattacgaaatgaaaaatatgaatgttatttttagacagcgctatttttgttattttccccctttttcagcaaaagtcgttatatatccccggatttataaaatcggacgtccgtttattgaatacaatagattcgtatcaattgatgaaaatccttcttttaaacaaatatttttttagtggaagttggcgaaaaaaattttttgactttttgtaaacgttaacaatgttgttaaatcagtataagcaaagaagtacgtatgattaaaaattataaattttctaaaaaattcacttgatttatttagaaaggagagtaaactaggaaacaataaaaaattcatagaacataggaggcgcttctagtgaatgagcaatggattttcttaaatggagaatttgttccaaaagatgaggcaaaagtttcagtatatgatcatggctatttatatggcgatggagtgtttgaaggaattagagtttatagcggtaatgttttccgtttgagagagcatcttgtccggctgtatgaatcagcaaaatcaatccttttagaaattccatattcattagatgaagtaacaaatattgttgttgagacgattcgacaaaataaattatctaatggatacattcgccttgttgtatcaagaggagcaggaaatcttggattggatcccgattcatgtaagaagccgaatgtagtagtaattgcagaacaattatctttattcccacaagaatattatgagaaagggattccagttgtaacagttgcaacgcgccgaaatcgtcccgatgttttatcccctcaagtaaaatctttaaattacttaaacaatattttagttcgtattgaagcgaaattagctggagtacaagaagcacttatgttaaatgatcaaggatatgtagctgaaggatcaggagataacgtgtttattgttaaaggaaataaattaattacaccaccaagttctgctggagcgttagaaggtattacacgaaacgccattttagaaatcggcgaaaaacttgggtatgacgtaagagaagagttatttacaagacatgatgtatatgtagctgatgaagtgtttttaacaggaacagctgctgaagtgattgctgttacgacagtagatggtagaacgattggcttagggcaaacaggtccacatacgaaccgtttattaaaagagtttcgtaagttagttgtagaagatggagagaaaatttacgaagaaaataaagttggataacaacttttttaacataagaaagcgttgatagggaggagtagttgattgtgaagcctcacagagagtcggtggttgctgaaaaccgatggttcacgtcgacgaacatcgcccttgagtgctaagctaaagcatttgtctaggcttagacggtagctccgttattagctagatccatttatggatcactgaggcaagagtattcttgcgaagaagggtggtaccgcgaaatctttcgtcccttcagcacatagctggagtgtggacgtaggatttttttattgtataaaagtttgaaaaagggggcttataagaacaatgtcttcaaaaacggaagagaaactggcaactggtgcacagctattgttagaagcgctagaaaaggaaggcgtagaagtgattttcggttatccgggtggtgccgttttacctctctatgatgcattgtatgattgtgaaattccgcatattttaacaaggcatgagcaaggggcaattcacgctgctgaagggtatgccagaattacagggcatccaggggttgtaattgcaacgagtgggccaggtgctacaaatgtaattacgggtctagctgatgcgatgattgattcattgccacttgtagtatttacaggccaagtagcaacaacgttaattgggagcgatgcttttcaagaggcagatattatgggacttacgatgccagtgacaaaacataactatcaagtgcgaaaggcctcagatttacctcgaattattaaagaagcatttcatattgctaaaactggaagaccaggaccagtcgttattgaccttccgaaagatatggtagtcgagaaaggtgagcaatgtagcaatgtacaaatggatttaccgggatataaccctaattatgaaccgaatctacttcaaataaacaaattactcaaagtaattgaaaccgcaaaaaaaccgttaattttagctggagcgggtatattgcatgcgaaagcttcgaaagaattgacaaattttgctcgtaaatatgaaatccctgttgtgcatacattacttggtcttggtggttttccaccagatgatgaactatttctagggatgggaggaatgcatggttcttatacagcaaatatagcgttatatgaatgtgacttactcattaatataggcgcgagatttgatgatcggcttacagggaatttagcttattttgctaaaggggctactgttgcgcatatcgatatcgatccagcagaaatcgggaaaaatgtgccaactgaaattcctattgttgcaagtgctaagcgggcattggaagtattacttgaaccagaagggggaaaagaaaatcatcatgaatggatcactttattaaaggggagaaaagaacaatatccattctcttataaaagaaattctgaaagtattaagccccaatacgcaattgatatgttatatgaaattacgaagggagaagcgattgtaacaacagacgttgggcaacaccaaatgtgggcagcccaatattatccgctgaaaaatccagataaatgggtaacttctggtggattaggaacgatggggtttggatttccagcagcaatcggtgcgcaaattgcaaagcctgaagaattagttattgcaattgttggtgatgctgggtttcaaatgactctacaagaattaagtgtattaaaagaacacgctttacccgttaaagtatttattttaaataatgaagctttaggaatggtaagacagtggcaagatgaattttacaatcaaagatattcacattctttattaccatgccaaccagatttcgtcgctcttgcgaatgcatatggcataaaaggtgttcgtattgacgatccacttcttgcaaagaagcaaatccagcatgctattgaattacaagagccagtcgtaattgattgtcgtgtacttcaatcagagaaggttatgccgatggttgcgccaggaaaaggtgttcaccaaatggagggagtggaaaaagggtgaagagaattgttacagcgacagttcgaaatcaaagtggtgttttaaaccgaattacaggggttatgacacgaagacattttaatattgaaagtatttcagtaggtcatacagaatcatcagatatatcgcgaatgacgattgttgtacacgttgaaagtgaacagcaagtggagcagttaattaaacaactgcataaacaaattgacgtactgaaagtatcagatattacagaagaagcgatgattgctagagagcttgctcttattaaagtagcaacttctgtagcgagggcagaattatatagtttaattgaaccgtttcgagccgctgtaatagatgttgggaaggattccatagttgtgcaagtaacaggtacgcaagacaaagtagaagcgttaattgaattacttcgtccatacggtttgaaagaaattgctagaacaggtgtaacagcatttacacgtagtatgaaaaaacaagataagcaagttatgttaattcaataatcatttaaatatagggggaaatgaaaatggcaaaagtttattatgagaaagatgtaacagtaaatgtattaaaggaaaagaaagtagcaatcatcggatatggctcgcaaggtcatgcacatgcgcaaaatttacgtgataacggatttgatgtagtagtaggtttaagaaaaggtaagtcttggaataaagcgaatgaagatggattttctgtatatacagtagcagaagcagcggaaaaagctgatgtagtaatgattctactgcctgatgaattacaaccagaagtatatgaagctgaaattgcaccaaatttacaggctggaaactccctcgtgttcgcacatggatttaatgttcactttgatcaagtaaaaccaccagctaatgtagatgtatttctagtagcgccaaaaggaccggggcatctcgtacgccgtacgttcgccgagggcggggctgttcctgcattatttgcagtatatcaagatgcaacaggagttgcgactgaaaaagcactttcttatgctgacggaattggagcaacgagagctggtgtactagaaacgacgtttaaagaagaaacagaaacagatttatttggagagcaagctgtactctgcggcggagtgactgcacttgtaaaagcagggtttgaaacgttagttgatgcaggatatcagcctgaacttgcatattttgaatgtttacatgaactgaagctaatcgttgaccttatgtacgaaggtggacttgaaaatatgagatattcagtttcagatacagcgcagtggggagacttcgtatcaggaccacgcgttgttactgaagatacgaagaaagcgatgggggcagtattagcagaaattcaagatggtacatttgcaagaggctggattgcagagcataaagcaggaagaccaaatttccatgcgacaaatgagaaagagaataaacatgaaatcgaagtagttggacgtaaattacgtgaaatgatgcctttcgtacagccgcgagtaaaggtaggggttaaataatatgaagcaggttttgttcatggatacaacgcttcgtgatggcgaacaatcaccaggagtaaatttaaatgaacaagagaaattacaaattgctaggcaattagagaggcttggtattcatgtaatggaagctggattcgcggcagcttccgaaggtgactttcaatcggtaaaacgtattgcgaatacaattcaaaatgctacggttatgagtttagctagagcgaaagaaagtgacattcgaagagcatatgaagctgtgaaaggtgctgtatctcctcgtctacacgtatttttagctacgagtgatattcatatgaaatataaactttgtatgtcaaaagaagatgtgttaaatagtattcatcgctcggttacgcttggaaaatcattatttccgacagtacaattttctgcagaagatgcgacaagaacatcgagagcatttttagctgaagcagtagaaattgcaattcgagcaggagcgaatgtaattaatattccggatacagttggatatacgaatccagaagagtattattctctttttaaatacttacaagaatccgttccatcatatgaaaaagcgattttttcttgtcattgtcacgatgatcttggtatggcagtagcaaattcgttagctgcggttgaaggaggagcattgcaagtagaaggaacgattaatggcattggagaaagagcagggaatgcagcgttagaagaagttgcggtagctcttcatattagaaaagatttttataaagcagagccttcaatgactttaaaagaaattaaggcgacgagtatattagtaagcaggttaacgggtatggttgtaccgaaaaataaagcaatcgttggagcgaatgcatttgctcatgaatcgggcattcaccaagacggggttttaaaagaagtaacaacttatgaaattatcgaaccagcgcttataggagaatctcaaaatctctttgtacttgggaaacattctggccgtcatgcgtttacggaaaaaatgaaagagcttggttatgaatttacaaatgaagagcgagatgcggcattcgaagcatttaaaaagttggctgatcgtaaaaaggaaattactgaagaagatttacgcgcacttatgcttggtgaagcagcatttgcagctcagcaatataacattacgcaattacaagtgcatttcgtatcaaatagtacacaatgcgcaacagttgtgctgaaggatgaggaaggaaatgtatatgaagatgcagccactggttctggtagtattgaagcgatatacaatgcgattcaaagaattttaggattagaatgtgaattggcagattatcgcatacaatctattacacaaggtcaagatgcacttgctcacgttcatgttgaattaaaagaaggtagtcaccaaatatcaggtttcggagttgcgcaagacgtattggaagcgtcggcgagagcttatgtccatgcagcagggaaattaaaatctcttatagcgcttgggaaataaatatttgataggtgagagaagctttcctcacctatcaaattaaagttctgaaaattcagttaaaaggagtgttaaaaatggaaaaacgtatcgtttgtttagctggtgatggtgttggtccagaagtaatggaaagtgcgaaggaagtattgcatatggtagaaaggctatatggacatcattttcatttgcaagatgagtactttggtggtgttgctatcgatttaactgggcaaccattaccacagcgaacacttgccgcctgtttagcgagtgatgcggttttacttggagcagtaggtggaccaaggtgggatagtgcgaaagaaaggcctgagaaaggattattagcattaagaaaaggactcggtgtatttgcgaatgttcgccctgtaacggtagaaagtgcaactgcacatttatcaccattaaaaaacgctgatgaaattgatttcgttgtcgttcgtgaattaacaggtggaatttatttttcttatccgaaagagcgaacggaagaagtggcgacagatacacttacgtatcatcgccatgaaattgaacgtatcgtttcgtatgcttttcaattagcgaataagcggaagaaaaaagtaacatctattgataaagcgaatgttttagagtctagtaaattatggagaactgtgacagaagaagtagcacttcgctacccaaatgtggaagtagaacacattttagtagatgcagcagctatggaattaattcggaatccaggaagatttgacgttattgtaacggaaaatttatttggtgatattttaagtgatgaggcttcagtattagctggatcattaggaatgcttccatcagcaagtcacgctgaaaaggggccttcattatacgagcctattcacggatcagcaccggatattgcggggaaaaataaggcgaatccaattgcgatgatgcgttctgttgcaatgatgcttgggcaatcgttcggattaacgagagaaggatatgcaattgaagaagcagtttctgcagtccttaaatcaggaaaatgtacagcagatatcggggggactgaaacgacaacttcatttacaaaggcagttattcaagaaatggaagagcaagcgttagtagggagaggaagataatggggaaaaggttactagataagctttgggaaagacatgtagttgcgactaatgaaaatggattggatttattatatatcgatctacatcttgttcatgaagtaacgtcaccgcaagcctttgaaggcttgcggcttacaaatcgaacagtccgcagaccagatttaacatttgcaacgatggatcataatattccaacgaaagatgtttggaatattaccgaccgcattgcgaagcagcaactagatacacttcgggaaaactgtaaacaatttcaggtgccattagcggatatcggagatgaagagcaagggatcgttcatgtaataggaccagaacttggactcacacagccaggaaaaacgattgtttgtggtgatagtcatacagcaacacacggtgcttttggcgcactagcgtttggtattggtacgagtgaagtggaacatgtattggcgacgcaaacgttatggcaacgaaagccgaaagcaatgggcattgagttaaaaggaaagttaccgcaaggtgtttatgcgaaagatattattttacaccttctttcaaagtacggagtagcagttggaacaggttacgtaatggaattttacggagaggccattcatgctatggatatggaagagaggatgacgctttgcaatatggcaattgaagggggagcaaaggctggcattattgcaccagatgaaaaaacggttgcttacgtaaaagggcgtaaatatgcaccgaaagactatgaatctattaagaaaaaatggtcagaactttatacagatttagatgcagtttatgatttacatattctagtagatgttacggatttagcgccgtacgttacgtggggaacaaatcctagtatgggcgttcggatcgatgagaaattgccagaaaagcatgatgcaaatgacgaaagagcgttttcttatatgggattgagtcccggacaaagtacgtatgacattccagttcaacatgttttcattggatcttgtacaaattccaggctttctgacttagaaattgctgcatctgtcgtgaaaggtaaaaaagtaaaagaaggtgtgcgagcacttgttgtacctggatctcaaagggtaagagaagcagcgatgcataaaggattacatcgcatatttgaagaagctggatttgaatggagagagcccggatgctcaatgtgtctaggtatgaatccagatcaagtgcctgaaggggaacattgtgcctctacgtcaaatcgcaattttgaaggaagacaaggaaagggagcacgaacgcatttagttagcccggcaatggcggcagcggctgcgttatatggtcattttgttgatattagaaaggagagttatgatggagccatttcgtattcataaaggtactgccgcagtactgatgaatgataacattgatacagatcaaattattccgaagcaatatttaaagagaattgaaagaactgggtttgggaagtttttatttgatgagtggcgatatgataataatcgccaagaaaaccctaatttcccgcttaatgcacaagaaagaaaaggagccagtatattaatcacaggtgataattttggatgtggctcgtcaagagaacatgctccatgggcgcttgctgattatggtttccgcgttattatcgctggaggatttgccgatatcttttatatgaattgtatgaagaatggcatgttaccgattgtaatggataaagatatgcgtgaacaacttgctaaaacagatgcgagggaacaaattacagttgatttagaaaatgaaataatgacaacgaatacgcatagattccattttacaatcgagaaaatgtggaaagagaagttattaaatggtttagatgaaattagtattacaatgcaatatgaacaagaaataaaagagtatgaaagaaaagtggctttacattaaaaaagtgacggaatattaaaaatgtatttacattcaaaattaactgttatatactatgtgaaaatcagaggagaaagggagtaagtattatgaatatcgtgcaatctattacaatgcttacacaactacatcatcatacatgaaacccttgaacctagcgtgaaaacgtgtaggtacaagggttattcccgttgtacctacactctactgaagagccttgtaggtattttgtctacaaggctctttttattttcggcttaggggaatgaaataggcatacattagaaggggaaaggtgtgaaaatttagatgacaaaatggaaacgagcaaacccgaatggaacgagagattatttattcgaagaatgtacgttaattgaagaagtagaacagaaattaaggcttacttttttagagagaggttatgaggaaataagaacacctacaattgaattttatgatgtttttgcatttcaaaatagaccgatagatgaagagaagatgtataaattttttgatgaaaagggaaggattatcgttttacgtccagatatgacaattcctttagcgagagttattggaacacagagatgggatacgccacttaaagtgacgtatagcgggaatgtatttcgagcgaatgaatcccattctggaaaatataatgaaatcgtacaaagtggtattgaagttatcgggattgataatgtaagagctgaaattgaatgtgtaataagtgtcattcaagcacttcaaaagttgaaggtgcaatcttttacaattgagattgggcaagtacagttatataaatgtattgtaaaaaaactctccatccatgatgaagaagaaagggtacttagaacgtatatagaaagtaaaaattatgcagccctctcaaattttatcggagaaaagaaattaaatcgatgcgatgagacagtaaggttacttgagaaattgccaaggctatttggaaatttagaagttattgaggaagcagaaaagcttgcttcaagtaatgaaatgaaaatggcaattgcaagaataaaagaaatgtatgaaacaattgaaacgttaggatatggttcttacatatcaattgatttgggtatgattcaacacttagattactatacgggtgttattttcaaaggatatatatatgaaattggagaagaaatcgttagtggcggaagatacgatgagctaattggcaattttggagaaatgctgccagctgttggactcgcggtacaagtaaatcaaattgtgaaggcgctgcaagagcagcaagaaccatatgaacgaaatcaaattgatattgtgattcattatgagttaaatagattagcggaagcagaaaggttacgaaatttacttcgaaaggatgggaagaatgcttggttatctctattctctaatttaagcgatacctttcaatttgcaagaaaaaataaaataggaacggttgttgaggcaaagaatgaatatttagtggaatatgtatggaatgagaaatgggtagtccagaaagaaggagaggcttcatgcgtaacattcaaattgcgttaacgaaaggaagattagaaaaacatgtcattccactttttgagcagattggaattgattgttccgagctcaaaaataaaggtcggaagcttgtatttcaaagtaaaaatacaaatatttcatttattttagtaaaagcggttgatgttgctacttatgtagaacatggggtagctgatattggcatcgttggaaaagatattttaatggaaaacgagaaagatatttatgaaatgctggatttaggagtggggatttgtaagttttgtgttgcttctattcctacgtataatccgaagagttaccggaagaaaagaatcgctacgaaatacccacatattacttctacttattttcatgataagggagaggatgtagaaattattaaaatagaaggttctgtagaaatcgctcctcttcttggattggcagatgcgattgtagatattgttgaaacaggaaaaacattacaagagaatggactcattgtatttgaggaaatgtactttatatcggctcggatgattgtaaataaggcagccttaaaaactaaaaaagacgaaatattcagcattataaatatgatggagcaagaaatcttatcagggaaataggaggatttaaaatggaaatcatttatgaagactttaaggaggcattatctaaaataaaagtgctaagagaaaacgctaatataatagaagaaactgttcaaagaagtgtaagagaaatcattagacatgtaagggaaggaaatgatgaggctttatctttctatacaaaaaagtttgatggtgtagagatgaaagattttcgtgtaagtgaagaagaaatacagcaagcgagtatgtttgtagagaattcatttttagaagctttaaaagaggcgaagaaaaacattgtttcgtatcacgaaaaacaaaagaagtattcaatcttcgattgtgaaagtaaaggcataattagagggcagcttattcggccattagaaaatgtaggtgtatatgtaccaggtgggacagcttcatatccttcttcagtattaatgaatgtattgccggcgaaacttgcaggtgtgaaaaaaattgtaatggtaacaccgccgaggaaagggggaattgatcctcatatagtagctgctgcaaatcttgcgggagtagatgaaatttatacgataggtggcgcacaagcaattgctgctttagcatacgggacggaatcgattccgaaagtggataaaatagttggaccgggaaatttgtacgtcgctctagcgaaacgagaagtatacgggatagtaaatatcgatatgattgctggtccatcagaaattgtagttgtcgcggatgaaacaggtaatgcaaaatatatcgcagcggatttattatcgcaagcagagcatgatgagagagcaacggcgatttgtattacaacgaatatggaactagctaaagaagtagaaaaagaggtagaaagacagttagaaacgttaccaagaagtgaaattgcacgtgaatcaataaatagaaatggagccatctttatcgttgcttctttagaggaggcactaaagttatcaaatgaaattgctccagaacatttagagttacatataaaagaaccgatgaatgctctagattatgtgaaacatgcaggctctattttccttgggccatatgcacctgaaccgctcggggattatttggcgggaccgaatcatgtattaccaacgagcggaacggcaagatttttttctccgttatcagtcgatgatttcgtgaaaaaatcaagttttatttcttatacagaggaagcattaaaaaatgtacagcatcatattgtagagcttgcaaataaagaagggttacatgcacatgcgagagcaatccaaataaggtttgaggaggaaaaataatgcgtcagtccagtcaagcacgtgagacgacagaaacaaaaattaaattaagtttgcagcttgatgaaagtacgagtgtatctattcaaacgggggttggttttttcgatcatatgctgactttatttgctagacatggaagatttggattgcaagttgaggcagaaggtgatgtatttgtcgatgcacatcacaccgttgaagatgttggaattgtactcggaaattgcttgaaagaagcattgcaaaataaagaaggaattaatcgttacggttccgcgtatgtaccgatggatgaatctttaggatttgttgcaattgatataagtggacgctcatattgtgtatttcaaggggaattaacaaatccgaagctcggggattttgatacagaattgacggaagaattttttagagcagttgcacatgctgccaatattacattacatgcgcgcgttctatacggaagtaatacacatcacaaaattgaagcattatttaaagcttttggtagagcgcttagagaagcggtcgaaaaaaatgccaacattactggtgtaaattcaacgaaagggatgttgtaattgattgccattatagattatggaatggggaatattcgcagtgtagagcaagcattaaaatatattgaggcagagtacattgtaacgagtgataaagaagagatattgagaagcgatggcgtgattctaccgggagtaggtgcatttccgaaagcgatggaagtattaaaagaaagagatttagtgtgtgtactaaaagaagtttgtgacataggaaaaccactcctcggtatatgtttgggcatgcaacttttatttgaacgaagtgaggaactaaaagattgtagcgggttaggtttactaccaggtgaaattcggaagttaaaagtttcgtataaaattcctcatatgggatggaatgaattaaggaaggaaagagaatttccgctttggaatggattagtggatggttctttcgtgtattatgttcactcatattacgcggattgtccagatgaaattgtatgcggagtaagtgattatggaatgcaaataccagggtttgtcgcgaaaggaaatgtatttggtgcacagtttcatccagaaaaaagtggcgaaattggcatgcaaatattaaaaaattttcaaggagtggtagaagcatggaaatcttcccagctatcgatttaaaagaagggcgatgcgttagactttatcaaggagagtttagtaaagaaacggtgatgaatgaagatccggtagcgcaggcgatcatatttgaaaagcttggagcggaaatactacacattgttgatttagacggtgcaattgctggcgagtcgttaaatttgcccgtcattgaaaaaatctgcaaggcggtacgtattcctgtgcaagtgggaggaggaattcgttcacttgtaacggtggagaagttattgtcagcaggtgtagaaaaagtgattttaggaacagcagctctttatgataagtcatttttagaggaagcagttcgtctatataaagagaaaatcattgttggaattgatgcgaaaaatggtttcgtagcaacgagaggttggcttgatctgtctgaaatttcttacgttagtttagcgaaacaaatggaaagtttaggtgttcaaacgattgtgtttacagacatttcgaaagacgggacgcttgcaggtccaaattttgaacaattagcgatacttcaaaaaagtgtgggcattcgtctcatcgcctctggaggagtggcatctattcaagatgtgaaaaagttaaatgatatgaatatatatggtgtcataattggaaaggcgctttacgagaaaacgattgatttagaagaagtgttacaggtaacgaagttatgttagcgaaacgaatcattccatgtctagatgtgaaagaagggcgagtcgtaaagggtgtaaattttataggattacaagatgtcggtaatccggttgaaatagctgaagcatataacgaggcaggggcagatgaaatcgtatttttagatattacagcgactcatgaaggaagaaaaacgattatagatgttgtagaaaaaacagcagctaaagtatttattcctcttacggttggcggggggatttcaagtgtgaaagatatgtacaatttactaagagctggagcagacaaagtttcaataaactcagcggcagtgcgaaacccgaagcttatagaagaaggggcagaacactttggatcacaatgtattgtcgtggcaattgatgctagaaaagtagcagaaggtaaatggaacgtatacgtcaacggcggaagagttgacacaggaatggatgccatagaatgggcgaagcgtgttgttaaacttggggcaggtgaaattttgttaacgagtatggatgcagatggaacgaaaagcggatatgaccttcgtttaacagaagaaatttcaaaaagtgtttccattccagtcatcgcatcagggggctgtggtcatacggatcacattatagaagtttttcaaaagacaacagttgatgcagcgttagcggcatccatctttcattatggtgaggcgacagtgcagagtgtaaagcgaaaattaagagatgcaaatgttgaggtgcggttatgaaacctaatttttcaaaaggattaataccagcaattgtcatcgaagaaggtacgaaagaagttttaatgctagcttatatgaatgaagaagcatatgaaaaaacgttagagacgaaaagaacatggttttattctcgttcgaggcagtcgttatggaataagggggaaacatcagggaatcttcaatatgtgcaatctttatatttagattgtgatcaagattcaattgttgtgaatgtgaaacaagtaggacctgcttgtcatacgggagagaagacatgttttcactatcaaattatatagggggatacatatggaaaatgcctttaagttgctgtataaaacaattgaagaacgaaaggaaagcccacttcctgaatcgtatacaaattatttattttcaaaaggagaagataaaattttaaagaaaattggtgaagagtgtgctgaagtaattatcgcatgtaaaaataatgataaagaagaagtagtgaaagaaatggttgatgtattttatcactgtttcgttttattagctgaaaaaaatattacattggaagatgtcatgcgagaggtgaaagaacgaaatggaaagctttcgagagttggggatagaagggaaatagatacattataagggggaatgtatatgaaagtagattatcatcttcacttagaagaaggaccgtattcaataggatggcttgctaaaataaatgaagcgctggaacgttatgaaccgcttcaagaaaggcattctattgattggcttatgaaaacacaagagcgtttgcaaaagcgtgtgaaggaagggccatttacaacagaatggatggacctctatttagaagaagctgtgcgaaaaggtataacagaagttgggattgttgatcatttatatcgttttcatgaagcgaaaggatattatgaaaaatatgtagatattagtgattctaagctcggtcgtatacagaaggaatggttagatcaagtaagggtagtttcactgtatgattttacaaaggtcattgaagaggcgaaagaacgatggagtaaaagaggtgtcacacttaaacttggaattgaagcggattattttattggttgtgaaggagagttaaaagaattattagcgctaggagactttgattatataattggttccgttcattttctaaatggctggggatttgataatccagatacgaaagaatattttgagaagcatgacctacgcgcattatatgatatgttttttaaaacagttgagagtgcgattcgtaccgagttatttgatattatcgctcatcttgataatataaaggtatttaattatcgattggatgagaatgaacagctttcttattatgaggaaattgcctgtgcgttagtagaaacgaatacggcaacagaaataaatgcaggattatactatcgttatcctgttcgtgaaatgtgcccaagtccactatatttacaagtattagctaagtatggtgttccaattacgatttcttcggatgcccattatccaaatgatttagggaattatgtacaagaaaatgtacaaacattactagctcacggtgttactcaggttgcaacatttacgaagcgagcaagagtaatgaggtcgcttgaagaagaagtaacaaattcaaaatgaaacgcaattttttgatgaaaaccgtcctttttgttcaaaataagaaagaatgaaaaggagggtaagaaatggcgaaacaacaaaataaacaaaatgtacaaggtgcacagcaacaagcttatacttctgaaacgaatgctgaatctcaatcggttattgaggagcaaattagcgatacggttgcagaaggaacgattgatgtgaagcttggaaaagaatcgcaggaaaaagcgtaagaaaaggggagagttgcatctcctcttttttcatggaaaagtgtcgatttttaaaactataatcaaattccttggtttttatatgtggatttcttacaatgaaatataagagatatcttattttctatagaagaggtgttagtagtggcaaaaatattagtagcgggaaaaattccggaaattggattagaactattaaaagatcatgatgtagaaatgtacgataaagaggagttaatttctatagatgaattaacagagcgtgtaaaagataaagatgcattgttaagtttactttcgacaaaggtgccaaaagaagttattgatgcagcgcctcatttaaagattgttgcaaactatggtgctggttacgacaatattgattacaagtatgcgggcgaaaaaggaattgcagttacgaatacaccgaaagtatcaacggaagcgactgcagaattaacatttgcacttcttttagcagcggcgcgtagaattcctgaaggggatacgttatgtcgtacgactggatttaacggatgggcaccgttatttttcttaggacgagaagttcatggtaagacaatcggaattataggtcttggagaaatcgggaaggctgttgcaaaacgtgcgaaagcatttggaatggatgttttatatacagggccaaatcgtaagcttgaagctgaaagtgagctgggggcaacgtatgtgatgttggaagaattattacaaacagcagactttattacaattaactgtgcttatagtccaaatttacatcatatgattgatgaagagcagtttaaaatgatgaagaaaacagcgtatattgtaaatgcttcacgtggaccaattatgaatgaagcagcacttgctcatgcattaaaaacgaatgaaattgaaggagcagctcttgacgtgtttgaatttgaaccgaaaattacagaagagctaaaagaattaaagaatgtagtacttgctccacacgtagggaatgcaacatttgaaactcgtgatgcgatggctgaaatggctgtcagaaatattttagctgtattaaacggcgaagagccagtaacacctgtaaatcaaaaggtattagttacaaaataaaaagaaaccttccggactcggaaggttttcttatttttctttattcgcttttttagacggtctttgtctaatgaattgagataacatgtacaaaatatatagtggaatggcaataaataagaaaacagaaaaatttccaaatcctgtttgatacattgtaataatgattccaactaaaaatagtgtaataatgatgctatatcgtggaattggtacatcttttaaacttgggatacgaatgcggctcaccattaaaaatgcgaacgttacaaatacggtaataagaacgatttttggaatggtatgtgaaaataatgttaagaaagcaacaagccctcccgctgctgtaatcggtactccagtgaaatatttcattgaagtagaagatggtgttacattaaatcgtgctaaacgatatgctccgaaaagagggaataatcccgctatgtataatccgatgattccgtagtttgagaaagatgtgtaatacattaaaacagctggtgctgcaccaaatgttacgacatctgcaagcgagtcgagctcttttcccatttgtgaatcaacacgtaataaacgagcaacacgaccatcaagactatctaacatcatcccgataagtactaaaatagcagctgatttataatatcctaaagatgcatagccgattgataaaaatccgctatataaatttccgagcgtaaataagtttggaatagctgctctatacaaaatctgatcccttgctttctgtaataaattcttaattagtgtatgaaagtttacttattttatcataccataaatttattcctcatacgaaagaaattaccaatttgtgaaagatttcatagaaggatggtttgaaaattaagtgaaaataaaaagaggaagcaacttgtataaagttgcttcctttactattcaaatttcgttgtcatcgttccagttttatatcgattattaggatcgaagcgtaataaatctccataaattaatttatcggagagttttaattctgtttttgctttttcaatatacggctgacatagcgtcatgtcagcttcttcacccgtacttcttttgtagcacatattttttgtataaacatactcttcagaaacaaagctaccatcacgcattaccataagcgggtctttctctttaataaataagtcagttccaaattcaacggatttatttgttttaataccaagtaaatgaaggagcgttggcttaatatcaatttgaccggatactttagaaacaacttttccttcttggccaggcacatgaataataagagggactcgttgtaattgcatagaatcgaatggtgtaatagtatcttttcctaggaactgtgccatagctgcgttatggttttcggaaataccgtaatgatcaccatagatgacaataacggtattatcatacaatccttcttcttttaattgtttaataaataatttaagagcttcatctgtgtaacgaacagttgggaagtagcggtttacaacaccactttccgagttgaattcatcaacatattgatcttccggatttagaagaaatggaaaatgatttgttaatgtaataaattttgtatagaacggttgcggtaaagattttaactttggaatagattgttcaaagaactctttatcttttaatccccaaccgacagacatttgctccgttcctgcgtaatcatttaaattaaagtaacgatcatatccaagcgcaggatacattacatcccgattccaaaacgttttatcatttgaatggaagacggcagaagaatatccgtatttctttaattgttctggtgtcgctgtgtattcatttgttgcatgagtaaagaatacagaaccacgatctagcggataaagtgagttttcaacgataaattcagcatcagaagttttaccttgtccagtttgatgatagaagttatcgaaatagaaactatccttaataaattcatttaaaaatggtgtaatttcttttccatttatttttttattaataacaaagctttgtgtagattccattgaaattaaaattacatttttaccttttgcagctccaaataagtttttatcaacttgtttgtcttttgagtctgtatagtttttaatttcagaaaacccatccccacttgcaaatacacgctcagctgaggacttggattgaagcgtaatatcaaatagatgatatgtgtataaacctaaattcttcacgacagtttgacggtcaaatgagcgtgagaacatttgtggtttataaataactgatacaacaatttgtagtgctaataaagctgttacaccgctaaagaaagttcgcttctctgagcgggaaagtggtgttttgtcgccaaatgatgggaatttacgcgaaataaacattaaaataattgcatctgcaaataaaagtaatgttttgtacgtaaagagttcttttatacttgtccctaaatcagccatattgtttgtttggaataaaactgggaaagtaacgaaatcgttatagaacccataaaacattgcgtttccaaataaaataaatgacagtataaaactgattccaattataattcggtttcggtgcttagatgcaagtaaagctaagccgaaaaataaaagtaacgcagctagtggattgataaaaagcatgaattcttcaaagaaattatcaattttaatatcaaatgctagcttgtacacaatatatgttttaatccatagtaaaacgactgcaacgagtgcaaatcgcagttttggaaacagatgttgtagcataatatactcctctcctaaaaagcatgacagttcttgagagtcagtttgcttaacgactcattttatatatacgaacagtcctttgttattatgattattatactatgagtatcattatacgaaaataaaagaaggttgtgggcttttttataataatcgagtagaaaaagagtggtgggagacaataaaacagaatttctatgtatgataattattgtacgcagaaagaatcgcgtgataatacggaggttataatgcgaaaattattatattttatagcatgcagtagtgttatactttttacttcaccgagtgtgtcggtagcccaatatgatgcacctcttatggaagatgcactttattctgttttatttccaaaaataaataaagcaattgaaaaacaatatggaagtttgaaaccttatcaatgtcctaaaattattagtttaaaaaaagtgtatagcggtacatatttatttcaagcaagtattgaagtgacaaagtatgaacgtgttgctgggaaaattgctccaccatttgagaaggtaacgattacatttaataacgaagaaggcgaatgggaagtaacaaaggtattagtaaagcgcttaccagacgatacgaaattaaactgcaaaaaaacaatataaaaaattgtttgacaaataaaatggtcctttggtattgttaatagcaacaattagatgtttgaaaattaaatagacttacctcatctactctcaaaggtagaggccgcgataggaaagagtaagctatgggagatttaatggaatctgtgatcataggttgaaagggactattgccgaaatataagaataaccatcttattcatatattgggactgcattgaataaatgtagtactgtcataagatttattttatggagagctatttggagatgttgatgcggtttcttattttgaggagataacaactcgtttattttttcaatatatatttttcctaataagaaacgcgtgtgaacattgttccgcgcgttttttgtctatctaaaagcgtgctgcaatgaatagaagattggggttatgagttttagaggaaataagggaggaatttaaatgtatttacacggcacaagccgaattaatgggcaaggacacttagaaattggagggtgcgatacgacgcagctagcaaagcaatacggaacaccactttatgtatacgatgaagagtctattcgaggaaaatgccgagcatttcatcgtgcttttaaagaaagtggtttctcttatcaagtagcatatgcaagcaaggcgttcttgtgcatggagatgtgccgagtagctcgtgaagagaatatgtcattagacgttgtctctgggggagaattatatactgcgctccaagcaggatttccggcatcacgtattcattttcatggaaataataaaacagaagaagaaatagtgatggctcttcaggcgaatatcggttgttttgtcgtagataatttctttgaattagaagttttacacgatttagcgatgcaacatggaaagtttgtgaacatattaattcgtgtaacgcctggagtagaggcgcacacacatgaatatattacgacaggccaagatgattcgaaatttggatttggcgtttcaaacggtcaagcgatgcaggcaattacatttgctttacaaaaatccaattataatgtgctagggatccattcacatattggatcgcaaatatttgaaacagctggttttgttcgagcgattgaagttcttcgccaatttttagtagaagtgagagagcaaacaaactatgtagtaaaagtgttaaatgtaggcgggggatttggaatacgctacacagagtcagatacaccattaactcttgagacatatgtgcgagctgtaacaagtgcagtgagagaacaatttactgtatgtgaatatccattgccagaaatatggattgaaccaggacgtagcattgtaggtgatgctgggacaacaatttatacagttggatctgtgaaagatattcctggtattcggaaatatgtatcagtcgatggtggaatgacagataatttaagacctgctttatatagcgcgcgttatgaagcgatgttagcgaatcgagggaatgatgagaatgaggaactcgtttcgattgccgggaaatgctgtgagagtggagacatgttgatttgggatattcatttaccaaaagtcgcttcttctgatttactagcagtttcctgtacaggagcatacgggtactcgatggcgaataattacaatcggattcgaagaccagccgttgtctttgcaaaaggcggaacatcgcaagtagttgtggaacgcgaaacatatgaaaatattattgggaacgatcgcatacgtattaaagagcttgtctaaatagaaaaaggggttgttcggatgggcaattccttttttgtaaaaataaaataattaaaatatatcggaaaactaggattgaaaaaaatcagaattatgataaaatacaaatacaaagcttatcaagagaagcggagggaactggcccgaagaagctcggcaacctgcttatagaaagcaaggtgctaaatccagcaaaatggaatccattttgaaagataaggtaaaatatattaccgaacagtcttttcgaaatgggaaagattttttttatgaataaaaaggggggctgttcgcgtgggtgtacgggaacattttgatgaagtatccgagaagattgaagcgatgcttgctgatatgaaatatggttcaattacaattgttgtgcaagatggaaaagtaattcagttagagaaaagtgaaaaagtacgtttaaagtgaaaagcgctgactagaaaaactagaggcggttttaacctattttcattaggttaaaaccgtctttttgcttttacagggggaaaaaacatgttgacgtatgaaacgtgggaagaaaatgttgtttcgttttcggaagaagatgaaacaaaaggcgcgctatcagtattaaagtgggcttataaagaatataaagatgaaatcgtctacgcatgtagctttggggtggaaggtatggtattgctgcaccttataaaccaagtaaatccatctgctaaagttgtatttttagatacaaatgttcattttcaagaaacatatgaattaattcaaaaagtgcggaggcgatttccttcattaaatattatagaaaaacaaccggaacttacgcttgatgaacaagagaagttgcatggcgagaaattatgggaaagtaatccgaatctttgttgtaagattagaaaaattttaccgttagaaaaatcattagcagcggaaaaagcgtggatatcgggcttaagaagggaacaatcagaaacacgtaagcatacaaagtttataaatcaagatcatcgttttcaatctattaaagtttgtccactcattcattggacgtggaaagaagtttggcgatatgtatacaaacatagcttgccgtataacccgttgcatgatgttggctatccaagtattgggtgtgagaaatgtacgttacctgtaggggatggtggcgattcaagagatggtagatgggctgggaaagtgaaaaccgaatgtggtcttcattaccaataagatgaatcttgaaataaagctaagagaggatatagaaaaatgagcatagtaaacgaattagtaaaccgtatagatgagacatatgacgtatcacaaattgaaaaagaaattaaattagacaatattgcgttaagtgatttagaactattggcgacaggtggatatagcccccttactggttttttagggaaggaagattatgattcagttgtagaaacgcttcgtttagcaaatggtagtgtgtggagtataccgattacattaccggtaacagaaaaagtcgcagaaagcctgaaggttggagaggaagtaaagcttgtcaacaatggaaatatatacggtgtcattcaaatagaagatatttttgtaccagataaagaaaaagaagcgttacttgtatataaaacaacggatgaggctcatccaggagtgaaaaaattatatgaacgaccaaacgtttacgttggaggaactattattctaacaaaacgctttgaaaataatcaatttccttcttatcatttagacccaattgaaacgagggaagcatttaaaaaacgtgggtggaaaacagtggtcggatttcaaacgagaaacccggtacatcgtgcccatgagtatattcaaaaatctgctcttgaaattgtagatggtctctttttaaatccgctcgtcggagaaacgaaatcggatgatattcctgctgatgtaagaatggaaagctatgaagtacttcttcaaaaatattatccgaaaaatcgtgtctttttaagtgtatttcctgctgccatgcgttacgcaggaccaagggaagcgatatttcatgcgttagtaagaaagaattttggatgtacccactttatagtagggcgtgatcatgctggagtaggagattattacggaacgtatgaagcgcaagaaatcttcacaaattttacgatagaagagttaggaattacaccactattctttgaacatagtttttactgcacgaaatgtgaagcgatggcttcaacgaaaacatgtccgcacggaaaagaagatcatgttattttatcgggtacgaaagtaagagaattattaagaaacggtgagattccgccaagtacatttagtcgtaaagaagtagtggaagtgctaattaaaggcttgaaaaaagaagtagtaacagaatagggagagaacgagatggatacgaatattacttggcatacagcttcggtttcaaaagatgagagaagagtgaagaatggacatcatagttttgtaatttggtttactggtttatcagcttcgggtaaatctacagtagcgaatgcggtcgctcgtaaactgtttgaaaagaatattggaaattatgtgctggatggggataacattcgccacggtttaaataaagacttaggattttctgaaagtgatcgcatggaaaatataagacgtattggcgaagtggcaaagttatttgtagatcaaggagcagttgtccttacagcatttatttcaccatttcgagtagaccgcaaacaagtaagagatttattagcggcagatgaatttattgaaatttttgtgaagtgtccgattgaagagtgtgagaaacgtgatccgaaaggactttataaaaaggcaagaaaaggtgatattaaggatttcacaggtattgattcgccttatgaagagccagagcaagcggaattaattgtagaaacgcacaaatattctattgaagaatgtgcagaacaaatcgtgaagtacttacaagagcgtagttttatatagggggataaacaatgagttatgaaaaagtatgggctaacaatgaaaaattaaatcagaccgagaaaaataaattagaaaaagatggcttagaaatttttaatgatattccttactatgcggaaaatggtttcgaatctattccgaaagaagagtgggatgcctttaaatgggcaggcttgtatttacaaagaccgaaagaagctggttattttatgatgcgggtaaatattccgtcagggattattacaaatgcacaggcagaagtacttgcttctatcgctgaagattatggacgtgatgtaatagatattacgacgagacaggcgattcagtttcactggttagaaattcagcaaattccagatatttttaaaaggttagcaagagttgggttatcttcagcgggggcttgtggtgatataacgcggaatattacaggtaatccgcttgctggcattgatgcaaatgaactatttgatacaacgaatattgtaaaagaagtatatgattacttccaacataatgaagagttttctaacttgccacgtaaatttaaaatgtctattagttctaatatttataattcagcaaacgcagaaattaactgtgttgcatttacgcctgcaacgaaagaaatagatggtgagaaaaaagttggttttcatataaaagtaggtggaggattatcagctcgaccgtatttagctgatgaattagatgtattcgttttaccagaagaagtgaaggcggtggcgattgcgattgctactatattccgtgattttggatatcgtgaaaaacgtcatttagctcggttgaaatttcttgttgcggactggggagcagagaaatttaaagagaaactaatagagtatacagggtctttacaaagtaaaggggaaagtgcattcaaaggatggaatgcaggctatttttatggtgttcaagaccaaaaacaaaagggattaaaatatgtaggttttaatgtaccggtaggtcgtttacatgcagaagaaatgtttgagattgcaagaatcgcaaagcaatatggaaatggacaaattcgtacatgtaactcgcaaaacttcattattccgaacgttcctccggaaaatgtaaaaggattacttagtgaaccgctgtttgaagtgatatctgctagcccgaaatcatttattggtcatgcggtttcatgtaccggtattgaatattgtaatcttgcactagtagaaacgaaagaaagattacgaaaaattgcagaatacttagatacacaaattgcactcgatgttccagttcgaattcatatggtaggctgcccgaattcatgtggtcaacgtcaaattgctgacattgggttacaaggggtgaaaatgaagacgaaggaaaaaggcattgttgaagcgtttgaaatatacgtaggtggaacattgttagatggcggtgcctacaatcaaaagttaaaaggaaaaatagatggcgaggatctacctgatgtactggcatcatttataagttatttcaaagagaataaattaccagccgaaacattttatgattttgtaggtcgtattggtgtagatacattacaaatagcgttaaataacgtgctagaagaagtaatagcgtcttaggagggacgatatggatttatatcgatttgaagctgtgttagtaaatagtattgttccgattgttgttgttgctcaaagtgaagaacaggcatttaagcttgcggagattgagcttgaaaagcattttttaccgttgccagaggtaaaagagatttctttgtttgaaaaaaagaagattcgaaaaggtggggcatttgttgtccatgagtagagatcagtaatacgaaaaaataaaaacttccattcttatatacgaatggaagtttcattttaatagaagaaatgaggagagatgatgggaaaggtttatattgttggagcgggtcctggcgatccagatttaattactgttaaagggttgaaatgtattgagaaggcagatgttattttatatgaccgacttgtgaataaagagctgctttcacacgcaaagcctgacgcggatttaatttattgcggaaaactcccgaattatcacacgatgaagcaagagacaattaacacgtttcttattaagtatgcgaaaaaaggaaaagttgtaacgagacttaagggcggcgatccatttgtgtttggtagagggggagaagaagctgaagcattagcaaagcaaggtgtaccatttgaaatcattcctggtatttcagctggaatagctgctcctgcttatgcgggcattccagtgacgcaccgtgatgcaagtgcaagttttgctattgtgactgggcataggaaagaaggtgctgaagaagaagtgaaatgggagagtttagcgaaaggtgtagagactttagcggtatatatgggggttagtaatttgccctacatatgtgagcaacttatgaagcatggaaaagataaaagtacgccagctgctattattgagcaggggacgacgtctatgcaacgcacagttgttggaacgttagggacaattgtagatgttgcgaaaaaagagcaaattcaaaatccgagcatgattgtaattggagaagttgtccgttttagagaaaaaattcattggtttgagaagcagacagaaaatgcttatcaagtaagtggagtgttgtaaaatgaaagccgtcttatatatatgtcatggaagtcgtttgaagacagcgaaagaagaggcgattcaatttattacatcgtgtatgaaccgtatagaagcgactattcaagaagtttgttttttagagttagcgaatccttctattgaagatggttttcgtacatgtgtggagcgtggggccacggagattattgctatccctgtttttttattagcggcaggtcatgtgaagaaagatattccgtgtgaattggtaaagcttaagaatcaatatccgaatgttaaagtgacttatggtaatccgtttggtgtatcggaaacacttgttaaatcggtgtatagcggaagtggcatcgaacaggaagataaaaatgaagtgacgttacttctcgttgcaagagggagcagtgatcctgaagtattaagagatgtaaactggattgcttctttatttcaaacaaaagagaaggttaaaaaagtagaagtttgttatttagcggctgcagagccaaaatttgaggagaagttaaaggaagttatagaacgaaaagaaaagaacatcgttgtactgccttacttgttatttacaggtttacttatgaaacatattgagaaagaagtgcgccaatatgaattggaagagataaaaatcagtccatatttagggaagaatgaagcgtttcaagatatgttaattcagaaaacgacggagttattgaaaggagatcagtatgtatccacttacagtgcgagttaatgagaaacgcgttgttgttattggcgggggaaaagttgcaggatttaaaattattcctttactcaaacagggtgcggatatagttgtgataagtccagaattagatgcgaatttagtaaaacttgtggaagaaaagaaaattcgttggtatcaaagagaatatgaaaaaagtgatattaaaagtgcttttttagttgttgcagcgagtagtgattcaatattaaatgaacaagttgctgaagatgccgctgagaatcaattagtaaatgttattacaaatccagaaagtggtaatgttcattttccggcagcgattcatcgtggtttacttaatatagcagtttctactgggggagcgagcccgaagctcgcaaaaaaaattcgagatgatattgcaaataaatatgatgagacatatgaatcgtatttagattttttatatgaagtaaggttgaagttaaaagatttacagttagaaaagagggaacgaaatatattgctccaagaagtgttgaaatcagtatatgtgcaaaacgaggggaaaagagaaagttttttacgagaattagaggaaaagattttaaaataataaaagataaagtgcgctttacaaatataaaaatataatttataatcacaagtaacttcaatagatgaaatcgatgagcaagaagagtacgtatatttgatgcgttcagagagctggggttaggtgggagcccggtacgataaaatgtacagaatgggcttgcgagaggtatgttgaacattgtagtaggcaacccgggttccgccgttaaaaggatagagtatcggaattattcctgtacttgaacaagtgggatttatcaatccaattgaggtggtaccacggtatttacattacatatatcgtcctctacatgcatatttgcgtgtaggggacttttttattttctaaaggaggtgtgcgagtatgaaatgaaagtgtataattaacaaaagtttaaatattcagaaaaggagaatttatgatgaaagaaacacagcaatggacgtcgaaaataggctttgtactcgcagcagccggagccgcagtaggtcttggtgcgatatggaaatttccatatgttgcaggtaatggcgggggaggcgcattcttccttgtatttttactattaactttatttataggtatgcctcttctaatagcggagtttgttattggacgtagcacgcaaaaagaggcggttacagcttataaagtactagtgccaaatagcaaattatatccttggattggtcgtatgggagttgttacttgttttagtgtactatctttttatagtgttgtaggtggatggattttactttatttatattatagtgtgacaggaagtttctggaatggagcagctgattatggacaattgttcggtgaaacgatttcaaatccattaagtgcgattggagcacaatttatctttatgctttgtacgatttttgttgtaagtaaaggtgtagagaaaggtatagaaaaggcaagtaagtacatgatgccgctattatttattttatttattgcgattattgttcgtgcgttaacactcgatggtgcttttgctggagtagagttcttcttaaagccagatttttcaaagcttacagcagatacgattttatacgcgatgggacaatctttcttctcactaacagtaggtgcctcagtaatggtcacgtatagttcgtatttaaagaaagaggaacatttagcgaaatcagcaacatctattgtaagtttaactgtttttgttacagtacttgcaggattagcaattttcccagcgattttcgcattaggagtaaaaccaactgaaggaccaggattactgtttatcgtccttccagcagtatttgcaaaaataccatttggtcaatttttctttattatgtttttaattttattcttctttgcgactttaacatcagcaatttcaatgcttgaaattgtagtagcatctgttgcgaaaggtaatgagaagaagcgtccgtcagcatcattattaatcggtattcttatttttgcagtcggtattccatcagctttatcatttgggattatgagtgacgtgaaaatattcgggaaaacattctttgatttagttgacttttcggtaagtaacgtattgctgccgttaggagtactagctatttcattatttgtaccaaataaaatgagtaaagagttattgatgaaagaattagaagtgacggaaacgaaggggaaaacgttatttaacatttggttcttcttacttcgttatgttattccggtaactgtaataattgtatttttaaatgcgataggtgtatttaaaatgtttgcataaaaaaaggcggggatctcccgtctttttttatgtggatgttgatgagtgtaataaacgattatatgctttataggctgtagtgactgcaaggaatgaaccgattaaaaataatactgagccgccaaatgtaaatatccggccaatatacgtctctctagcttcttctattttttgttgtaattgcgtattcatattgatcaccccgtaaactataggcatttagttatagtctatgtagaatgcctatattgtgtgaagtgtaaataaaaaacctcggtaggcaccgaggttttttataatccgatataaggagatgggtcaactgcgtttgtcttgccgacattccattctccaagatgaagttcgaagtgtaaatgttgtccgtatgattggcccgtgtttcccataaatccaagctgatcgccttgttttacagtttgtccattcgatacagaacggctattcatatgagcatatactgtcgtatatgtttttccgtttatacggtgagataaatacactacgtttccgtaactagatgataattctgaacgaataacaacgccatctgcagcggcgataattggaaccgttcccgaagcagcgatgtcaattcctttatggttatctaaagaacgtacaccaaatccggaagtttttgatccagctgctggtttgataaagccaccgatgtttgtatcatgtggtgttggggccgcttgagttgcttgagcagatttagtagcttgttgtttgcgagcctcttctgcctggcgagcttcttcggcccgtttttcttcttcaattgctttttgaacagcttgacgttgattttctaaaatgcctttggattcttctaatccttcaatctctgaatctacttttgctactttcgtatgtagatcgttaataagagtttgttgctgttgttggttattttgtaattcttgctgtttttgttctagtttttgctcagattctttcagttgttgttcttttttctcaacagcctctttttctgacgttacagcattttgatcagatgtttgtttttttacaatatctgtatcgttgtttaatattaaacttacggagtacatattatcaacaagatcggcaatatttgaagaatttgttagtacctctgtaatgatatttgtacgaggtttttcttgcatagattgtaatcgttgtttaataacttcctgacgtgtatctatgtttgtttgtaattgttctatatgtttctttttgtcagcaattacttgttgagttttgctaatttctttttttgtatcgtttaattcagcttcgtttttattaatagaagtagttaattcatcaattttcttctgtaattcttgaatttctttttctatttgttctttctcgactgatttattttgtaagtcactttgtttgccttctaattcagattgaatgttagataatttatcttgatttgtttcagcgtatacgggtgaaagtaacggggaagcaaaaatcgttcctgctgctaaaacactaaacgctgcaaatttctttttcatagttgtctgactcctttctctatgaatgttatatatcataagaagaagagtgtctatcgttgtaatcataatgtaaagaaaactttataaaattgctaagttttgtcggaatttatcatttttcaactgtaattgtcatagtacatacattttattcatatgtgtaacaaaggtatattttggaattaatctgtaaaatgaagaaggaaagtaatcgtttttatgaggtgaaatattacttggaaagctaataaaacactagtgaggaatcgttctcatgttaggttttctgacatgggtctgctttttgtcaagaaaattatttgtgttcgggcaaagttattttgttgtcagatttaaatttttgatttatgatttttaacagggacaaaatgtagtgaattgtcgaataatatgtaatactcttaatttcttagttttatagagatagaatgagagatagagtgacacatcgaagagggggttacaacaaatatgaaaagaataggacttgcatggcaaatattaatagggcttgcgcttggtattgcggttggggcgattttctttgataatccagctgttgtgaagtacttacaaccaattggtgatattttcatccgattaattaaaatgattgttgtaccgattgttgtagcaagtattgttgttggggttgctggtgttggcgatgttaaaaaactaggtcgactaggcggaaaaacaattctttactttgaaattattacaacaattgcaattattgttggtctattaatagcgaatattttccaaccaggaaaaggcgtaaatatggagcagttaacaaagacagatatttcgaaatatacacatacgacagagcaagtacaaagtcattcatttgcagatacatttgtaaatattgttccaacgaacattatgaagtcgttagctgacggagatatgcttgctattatcttcttctctgtactatttggtttaggtgtagcagcaattggtgaaagaggaagaccagttcttcaatttttccaaggtgtagctgacgcaatgttttacgtaacaaaccaagttatgaaatttgcaccatttggtgtgtttgcactaattggtgttacagtttctacatttggtcttgcttcattaattccattagggaaattactaattgtcgtatatggggcaatgatcttcttcgtcgtagttgtcttaggccttacagcgaaaatatttggaattaacattttccaattctttaagattttaaaagacgagctgatcttagcgtattctacagcaagctcagaaacagttttaccaaaaatcatggagaaaatggagaaattcggttgtccgaaagcaattacatctttcgttattccgacaggttattcatttaacttagatggatcaactttatatcaagcaattgcggctattttcttagcgcaaatgtacggtattgatttatctattacacaacaaattacattattgcttgtattaatggttacatcaaaaggtatcgcaggtgtaccgggcgtatcattcgttgtattattagcgacacttggtacagtaggtattccacctgaaggcttagcgttcattgctggtattgaccgtattttagatatggctcgtacagcagttaacgttgtaggaaactctttagcagctgtagttatgtctaagtgggaaggtcaatatgacgctgaaaaaggacaagcttatttaaaagagatttctgaaaagggtcaagcggcttaattataatatgaacaagctctcacataatatgtgggagcttttctgtatatagaagaggagcagacataatgaaacgtaaatatggtgacggttcttcgtggaagaggctaatagaaaagagttatacggttaagcaagtggaagagggaatgctcggaatactggatataaaaaaggtgagagagcctagttgtaaagaatatgatggtgaagaactttgtattgcagcggatcagtatacgtgggttcaatattttatagaagggaaaaactttgcgattaccgctatgttagatgatcagaaaaaattagtgcaatattatatcgatgtggcgaaagaatataaaatagacgatcgtggtttaccgtattttgatgatttatatttagatgtagtattattacctagcggtaaggtgtatgtattagatgaagaggagctagaggatgcttataaaagtgtcgatgtcacgaaggaagagtatgagttagcttggtacactacgaaatggatattagcagcaataaaaaataatgaattttattggatttcaatgttgaaagaagaaatagaaaagttaaaatgattgttgtattcgaatttttgtataattaccaaaaaaatctatacaaaaaataattgacttttgttttgtaagcgagtaaagttaggaaagaaattattattaaaaaataaatatgaaaccttcttataaagagaggcggagggactggccctacgatgcctcggcagcggactcgatttcagagtgctgtgccaaatccagcaagcgtgtgcttgaaagatgagaagagtgtttcttatagatgtataagacctcttctcatcggaagaggtcttttgttattcattagaaaaaggttgaaactagggagagatgatactttgaaagaaacgagaggaaatggtttagctttattaccacttgggatatttttggcgctatttattggttctggaattattacaggtgatttctataaattgccgatacttgtagcgatctcaattgctgtaggagtcgctttaatgatgaatcgtaaagaaagttttaatgtgaaagtagagcggttcgctaaaggtgcaggaaatccggatattatgattatggtattaatttttgtgcttgcaggtgcattttctgaaactgctaaaggaatgggcggagtagactcaactgttaatttagcattaactattttaccgccaggatttatcgtagctggaatctttgttattggtgcatttatttcattagcgatgggaacttcaatgggaacaattgcagcattagcgccgattgctgtaggtattagtggtcaaactgatatctcaattgcgcttgcaatggctactgttgttggcggagcgatgtttggtgataatttatcatttatttcagatacaacaatcgcagctgttcgttcacaaggaacagaaatgaaagataagtttaaaacgaactttttaattgtgttaccagcggctattattacaattgtactattagtaatagttacttcagggagtgacacgcagattaaagcacatagctttgattggataaagattttaccgtacgcaggagtactaattacagcgctacttggctggaatgtacttattgtattaactggtggaactgtactatctggtgttatcggtcttatagatggaagttacacgttagaaagtttctttaaaagtgtaacgactggaatgggcggtatgatggagttagtattacttgctatattaattggcggtatggttgaattaatccaatataatggtggtattcaatatttaatgaatgtattaacacgtaatattcgttcgaaaaaaggagcggaatttggtattgctggtttagtgagtatgacgaatatgtgtacagcgaataatacgatttcaattatttttacaggcccgcttgcaaaaaatattgcagatcaatatgaaatagaccctcgtaaatcagcgagtgtattagatcttttctcatgttgtgtgcaaggattaattccgtacggtgcccaaatgttaacggcagcaggatttgcagcgttatctccagttgaattgttaccgtatgcgttttatccaattttagttggagtatgtgggattgtttctattttaattgggtttccaaggttttcgaaagtagctaagaaaaaagagtatcataaaactgcttaatttaatatgaatgttagtaattaaaaaaagtgcagagaatagactctgcactttttttttgcgtaaagggctgaatatgactcggtcttaagtctgagttaaaaacggttcttaagctcgttatggaaagatgaaaaaatagttaagataagagtatcaaatcgaagggaggcaagcacaagatgaaacaatttctagcgtttatcgcagccggtattttggctttaattgctcttggtagtcttgctggtattgtaggattcgcaatcggagcaggagttgtatattggagctataaatcatttgtgcgagctaaatcattttttggaaagttagcttggggtattgttggtttaatcggtttatccattgcactttctcattcgccagcattaatcggtatcgctgctttagtggttttatactacggataccgtgagtggaaaaaagaaaaagatgtagttgttgaatctgctccagaaagttctaaatcatatagcaactttgaagatgagtggaacaaattaatgaaaaactaaaacaataaatcaaattataattaaagtagaagagaggaagatttataatgaaacaatctttattcggacgtgtacgcgatgcaattttagctgattttcataacgtgttagatgagaaggaaagaaaaaatccaattgcgatgttaaaccaatatttacgtgatagtgagcgtgaaataacaaaaattgagaagttaattgagcgtcataaaacattaaaatctaactttgctcgtgagcttgagcaagcacgttatttcgttaataaaagatcaaagcaagctatcattgctcaagaagcaggtgaattacaattgcacgaacgtgcgttagaagaggtagcttattatgaagggcaagtaactcgattagaagaaatgtatgcaggtgttgtagagcaaattgatgagttagagcgtcgtctttctgaaatgaaaaataaattaaaagaaatgcacgcaaagcgtatggaactaatggcacgtgaaaatatggcacatgcaaatcgtcgtatgaatactgcgatgcataaaatggatgaaaataatccattcttacgatttgaagagattgaagatcatattcgtgacttagaaactcgtatgaatgaagagcatgagcgtgacacatttgatatgaaaattgcaaaacttgagcgtgaaatgaaagaaaagaatgatgtatcgttaacgaaagagttaacaaaataatagtagtatattataaaacaggcttatgatatagtgataggagaaaaggtgttggaaagcaatgccttttcttctatgtatatgtgacaagaaggggggagctgaaatgaagaaacatttttcaaagacacaattaatggggatgctcctcatcatatttgggttcggtctttttcttgatatgatacttggacattttgaaccaggtggtctcatttttgcatttattatgcttatgtttggaaggcattatcgtaaaaagaatcgttatgtacggggaaatgtatttttatttgttggtggtatcgtatttttattcttcttattttcatcagcagcatttgttcttgtcgtatttgcttgtttagctttaattggttatcaattgattcaacaagggcatcagcaaaaagcaatgaaggttgaaattaaagaaaaagggatgatagacgaagagaagcaaatatatcgtacagaaccatatttaaaaaatatgtttgtaggcaatgtgcgaatgatggatcatatttatgaacttgaggatattaatgttcaatatggtgcttgtgatgtggaaatagatttaacaactgctatgattccagaaggggaaacggtaattgttattcgaggtgtcgttggtaatattcgtttatatgtgccatatgatattgaactttctttaaatcattctgttattgtcgggcgtgtgctcttgccaggttatgaagagacagggtttaaccgcaatgttacatttagaacagagcagtataaagaggctcctcgacgtattaaaattatttcttcgcttgtcgtaggcgacacggaagtgaggaaagtataatgaagaaacaaaaaaatatttcgtggatgtatattcgttattctatgttgtcctctgttagtatcgcactcatttgtacaattgtatatgtatggaaaagcgagcaacaagtgtatgatttattatggaaggaatccatcgcttctgttccaattggcttgtttattatgactacaagtttacttatcgggggaattgtaggatatgcaatcggttactatatagagcagcgtatacaaggattaaatacgtttctatttgaagtagagcgagggaattttccgagcgatgtttcgtttactgcagatgatgaatttcatgaagtggaacgaaaagtaatcgttctggctcgtcgattagaggagcaagctggactctttcaaaaagtaacgaatgaacgagctcattggaatgaagagatgagacaagaagcgatttctcaagaaaggcatcgtttagcaagggagttgcatgattcagtaagtcagcagcttttcgcaatgtcgatgatgatgtcagcgattaatgaacaaataactgaatttccagatgtgacaaaaaaacaattgcaacttgttgaaaatatggttgtaaatgctcaatcagaaatgagagcattgctccttcatttacgtcctgtacaattggaaggtaagaaactgacagaaggtatagaggaattattaacggaattatcgcgaaaacaacatatgaaaattgaatggcttattgagccaatagaattaaaaaaaggtgtagaagatcatttattccgtattgtgcaagaggcgctatcaaacacgttgcgacacgcgaaggcaaagaaaacagaagtgcgccttcgaaaaattgatcaatatgcgattttaaaaatcattgatgacggcgttgggtttgaagtaggggttaataaggctggttcatatggcctaagatcgatgcaagagcgtgttcatgaaattggtgggacacttaaggtacttagtttcccggccaaaggtacacaaatagaagtaaaagtaccgattatgattgagagagggggagaagtatgataaaagtattgcttgtcgatgatcatgaaatggttcgtatgggtgtatcggcatatttatctacacagccagatattgaagtagtaggggaagctgagaatggaagaaaaggatcacaattagcattgcaattaaggccggatattattttaatggaccttgttatggatgagatggacggtgtcgaagcaacacgcgctattattcaagaatggccagaagcaaaaattgtagttgtaacaagctttttagatgacgaaaaattgtatcctgttattgaggctggggcgaccagctacttattaaaaacatcaagagcaagtgatattgctgatgctgtacgagctacttatgatggagaaacagtattagagccgaaagttaccgggaaaatgatgtcccgtatgcgtcaaaagaaagagcaacctttgcatgatgatttaacggaaagagagtttgagattttgttattaattgcagagggaaaaagtaatcaagagattgcggacgagttatttattgcactgaaaacggtaaagacacatgtgagtaatatattaaataaattgaatgtaagtgaccgtactcaggcggttatttatgcatttaggcatcaattaacgaagtgataaagtgaaactttaatcagtgggaggttgttcctctcccactgattatcagccctcaccaatcgggcttttacgggcagttaatgcgggataaagtgaaactttaattggcggggaattcctcgctgattattggctcgatacaatatagatttggtgttaaaacaattgaatgtttttattgacgataaataatgtaagcgttatcattgaggtgttaacagtacatataaaggggagaatgtatatgttagttcaaactatattcggaatggataagtctaaaaaattaggggattatgtgaacgcattacaagcgctttgtgaacaatataatgttgaaacagataaaattgcgattattgaggcaacagaggaatactatttatttttagtaaagcaagaagagcactatgatgttgtcaaggtagaaacagttgatacgaatattgaatattatacgaaggcttataaaataagcagttttaatcatactgcgtatcaaatgtaaaaaaactcccttttgggagtttttttaggaggcttttacttcgtgagattcggttactaatggaacttttttcgtaccgcttaacttagccattgcaagaccaataagagctcctgctaatgctggtattagccaaccgattccttcattatataaagggataaattcaaaatatggtgtgataaatgaaactgaaataccaccttgttttaatccatcaaatacgctcactacagctgctccaattaaagcacctacataaacagagcgatatccaccgaagtatttatgaagcaatgatagtagtacgagtacaatcgcaattggatacacaacaagtagaattggaacagagattgcgataattttcgttaaacctaagttggcaactagtaatcctaatgcgcaaatgatactcgcgaacgttttgtatgaaaatgtagtcaataatgttgaaaaatattggctgcacgcagatacgagtccaacgcatgtcgttaaacaagcgagtgtaacgataagagataataggagcaaaccgtatggaccgaataattgttgtacgataacagtaagtagctgtccgccattttttgcatatccgagcgagacgctagttgccccaagccagccgagtgcaccgtatacaagtacgagccctgtagaggcaataagccctgcttttgctgtggcgatggcaatggacttacgatcattcacacctttagagcgaattgcatttacaacgataattccgaatgcaagtgctgaaatagtgtccattgttaagtagccttccataaagcctttgaagattggagaagtttgatactcttgcattgctggtcctgattgcccaagtggtgtaaatacacttttaacaaacaataagaaaatagagagtaataaaataggtgttaatacatttccaatacgatcaacaagtttagatggattcaaactcagccaaaatacgatagtaaagaagatgattgtatatacaaatagcactaggctgctagagcggattgtttctggtaagaaagaactaacacccatttcataagcgacatttgcaacacgtgggatgcccatagatggaccgatagcaatgtatacaattactgtaaagaaaattccgaataatggatgaacatgacttgcaagttgctgcattccatttccagatagagaaattgcgataacagttagtagtggtaagccaactcctgttagtaaaaatccaatcattgctggccaaaagttttcacctgcattttggccaagcatgggagggaaaattaaattacctgccccaaaaaataaagaaaatagcataagacccgtgaaaaaaatatgtttttttgatacagtgttcattgtttttcctccttttttaaattcatttgtaagaacacaaaaaactcgtccctaaagaaagggacgagttatatttacccgcgataccaccctaatttacacatgtagaaataaatctatatgtatacggctttgcaacgtacaacatgatacgtgttccttgtaacgggggacggccggtaagaacttactgtaacattcggttctacttctcggagatgattttcggttacgcgctgaacgttggctttcagcaaatcgccaactctctggggaacagttctataacgtactcgttctcgtcaatgaatttttattcaagtattctgacagtattgttgcatgttttttttagaaagtcaatatgttttttgaaagatatatttatatacggaaatatcgaaagtgatattcgttgttgtaaaggaaatgatgaattgtaaaatgggagtggaaatttgcggagaattgtaaattttatagagaaaattgatatttataggagtgaagaagggattgtttgaatttatagagaataatacaacaatccacttgctggaaagaacaaaccaaaagaggtgactgaaatgcttgcgatgggagtattatttggcattattgctataattggttttatgtggttatattattcgcgttcgtttaaacaagcagaagttttactctttcaaaaaggtagtttgttgacaaatcagtctagatatttagtatgtccgaagtgtggaagtgcacaggccagaagtggaggatatcaagagtgttgcaaaattagattatgaaagaaaggaagcctcacattattttgtgaggcttccttccttacaacttcatggcgctccaaattgtccatcgatctctttcaataataggagagacgttttgtaatgcggtctgtatatgttgtagaagttgagaaagttcatcatctgttaactcatatagaatggatcgacctgttcgaggagataaatcttgcaataatgtttctacagaatcatgtatttttcgtatttcccattgtgtttgtgtgggaagtacatgaagagaatgtttttgtaattctgtctgtatagtgttggtttttggacgtctttttgactctatttcaataagttttggaaatagagagaaaaaatatccgcgaatgtgttcgggacttcctggaattgtacaatcttcaattgttcgatcttgtaaaataagtacaccgtttttatttaatatacgagaagcttcacgtaaaaatgtaggaatgtcttgtaaatgatgaataactgcacgcgaaataactatgtcgaatgtttcattagggtatgggatattatgtgcatcaccgtggatgaatgaaatgtttgaaaagttgttacaattttcttttgcagcttgtaatatttcttttgaaaaatcaagtcccacaacattattggctcccataagagcgaattctttcgtataaatcccaccaccacagccgatatcaattatttgcttgttttgtatttctgtaatgttttttaccatttcagcccaagaaatatgagcgtttcttgttgcatatgtgtacttattattttcatcatgaaaattaatggacatgataaagacctcctttcaatgattagtatagcgtatttaataggatgtcacgtttttgttttatgtatgaagattataaggatttcttatcgtaagaggaggattaatttgaaagggaaatatgtattggtgttgttgtttgttatgttactagcagcttgtggtcaagttgaaccgaaaaaagaaacaaaaaaagtagaagagacggtgaatgaagtgaaagaaacaataggggtaaccgttttacaaaaaaaacataaagagaaaaagttgcaggaatcagaagcgaagttagtaatagacattttgaataaagctgagaaacaagaaataacaggaagcttcggtgaacctgaatatgaaatacaaattagtagagatgggaaaaaagaaacttattatgcatggttaaggggagaagatagacgaggatgggtgcaatataagaaagctatgtatatgttgaatgaaaaagatacggaaaagcttttggatatatttccaaatgtctcagaacaaaaagaagatgagatgcaggtaagccctttaacggaagtaacaaaaaaagatttgcagattaccgcgtttcatattaaaacaggcgatcaaaacgtgaattatacggtacggtatacgatttcacaatcactatacaataagttagtgaaggagcaagaatattatttgcaactcaattttccagaaaaagttcaaaaattaattggagcaaaagagagtgaaatgattttaggtgaaaaagtaaaggaagggtataagcaatatgaattacatgctactgttccgataaaaagcgcttcagaatcacaattaaaatcattagaaacatattacgaaagttatgatttgaaaatattaaacagtaaaaaagaaaaaataggtgtgtttcaaaatataattcagattgttaaagattatggtgaaaaaatgaattttcaaagataaagtgagactttaattagcccttacggattggaatgaatataaactcgtcaaatctatatgacctttcctaggaaatgataatagagaggggaaagcacccctctctattactttgcttttgcagatggctcattcattgattttcgtgtaataagaaaagaaatcataagagcggaaaggatgacaagggcaataaatacgtgattgggcaacaaatctaataataatacgtaactaacggtataaaaaataagagttgaagctaaaaacgatagagcacctattataagagattgtaaattcatttttgtacacctccttttatttatatttttggctgaaaatggattatataaacattatttctaacaatagaaaaaaatatgtcataatagagaaaagaacaagctttaatgaatgaatatgattcattaatgagagataaaggagaggaatatgaaaaataataaaaaaggattatggggaattattgttgcgataggtctatttttactgtctaagttaaagtgggtatttgcaatttttaaattagcaaagttttcaacggtatttagtatgtttctatcgcttggcgcatacgcagttctatatggttggaaatttggagtggcgctcatttatttgttgtttgttcatgaaatgggccatttatgggctgcgaaaagaaaggggatcccaacatcgccagcaatctttattccatttatgggggcccttattggaatgaaagagatgccgaaaaatgcgaaagatgaagcttacattgcctatatgggtccgcttttcggacttctgtcatttttaccagcgataccgctttatataatgacgaaagagccattttgggcgcttgttattttgcttggaagtatgattaatttctttaatttaattcccgtttcgccgctagatggtgggcgaattatttcagttgtcagtactaaaatttggggggcaggccttattttattacttggctattcaatttactttaaaagtattttgggaggatttattgttattatcggttgtatggagttatatagagtaataaagagagatgagccgattaaggaattagggcataaaattgatgggatgaaagaatatgttactaggcttgaagaggaattaaaagaaacgggtgctgtacatcggactatatacgtgatgcatcatgagatgaatgcattaagacaaagagaacgggaaaaagagttacaaataggtgaacttcaaaaaatggaagtgttagagtatcttttaccgaagttcgaaccgttagattatgttccatatgaagatgaaaaagatgagtatacaattcacataagggaagcatttgaagcgtcagaaagaaaattaaatgaatggaaaacagaaaaggaacaacaagaaaactattataaagtggatgcgaaaacgaaatggacagtatttgcttgttatatcggattaatggctatactcggttacacagcttatgaaggatatattgttttacaagaacatttgccaacgagaaatgtatagaaaaatattgtcgaaatgataggaagaatttatacaggaattatatttctacgagagaaagttacaagtatagtcatacattgtaatatttttagtagagaaggagttctgtatatgaagaaattgttaagtgtattcgggattattatcgtgatgatcattgcaagctatagtcttatgaaagtgctgttacattatgcgaataagcctgctgaggtaaatacaatagctcaaatagaagatgtgcaagaagagacaaaagtgctaaattttattcgaatgacacatgaaagctataataatttcttaaattacggtaaagcagagaattatacagacggggatttgaatcaatttaagcaatggtttcaacaacaagaatcatcgttaaaaaatatacatacagaaataaagaatgaaaaaataaaacgtgatgtaaatagaagctatgaaattgtaaaaaaaggtgtggaacttcaaaatattgagtatgtagtgtatgcccaccgtgtatatcatgacttggatattatcgtaaataaatatagaggtgaaacgaatatctggggatatacggagtttggcgatgggaaagatataaaagtaattgaacaagctatacaaacaaaataataagctagctagaattctagttagcttattttcttttgtaaatacaatgttcatatattattcacaaaaacaccgtgttaatagtgattaaaatcacaatctgcattataagattcagttaaactaaaaacagttaaggaaatagaggagtgggatacaatgttaagtgcaaaaacaattgaaatcgtaaagtcaacagtaccattattacaagaaaaaggcgttgaaattacaacgagattttacgaaattttattttcggaacatccggagttattgaatattttcaaccatacaaatcagaaaaagggaagacaacaacaagcgttagcgaatgctgtttatgcagctgcaacgtacattgataatttagaagctattattccagttgtaaaacaaattggtcataagcatagaagtttaggtattaaagcagagcattacccgattgtaggtacatgtttactgcgtgccattaaagaggtcgcaggtgcacctgatgaagttttaaacgcatggggagaagcatatggtgtcattgctgatgcattcattagcattgaagcagagatgtatgaagaagctgcacataaagaaggtggatggaaagacttccgcaactttgtgattgttaaaaaagtgaaggaaagcgatgttattacgtcattttatttgaaacctgaagatggagggaaagtttcttcattcatcccaggtcaatatgtaacggttcaaatcaatattgaaggtgagacatatacacataatcgtcaatacagtttatccgatgctcctgggaaagaatattatcgtattagtgtaaaaaaagaaaaaggtgtagatacaccagacggtaaagtgtctaattacttacatgaacatgtaaaagaaggagatgttttaccagtaagtgcaccagcgggagatttcgtgttaaatatggattcaacattaccagttgtactaattagtggtggagtagggattacaccgatgatgagtatgttaaatacgttaattgagcaagattcaaaacgtaatgtatattttgttcatgcagcaataaatagtaatacacatgcaatgaaagaagacgttaaggcagtagaaaatgaatatgaacaagttaaagcatatacttgttattctgcaccgactgaaaaagatttagaaatgaagaactttgataaagaaggtttcattgaaagtgaatggttaaaaactattattccgacaactgaagcagagttttatttctgtggtccagtagcatttatgaagcatataaatgctgcactaactgatttaggtgtgaaacaagagcatattcattatgaatttttcggcccagcaacaagcttacaataagcaaaaaaacgaggtatttattttacctcgttttttatttgttctcgtaataaacggtttactgtttcacgacgtatacctatcagttgaccaatttcggtttgtgttaatatttcatatataggaatgtcacctaaatatagggtgaaccattcttgtaaacgatgaagacgttctttcggagagacggttgtcaattgatcaattcgttgttgcatcattcttaatttagattgcaattgcatagcgatgttagcatacgattcgggatttgcttgaagtctctcgtaccattcactactagtgatcggttccacttctgtttttattaaagcgatagctgtaccgtgatattctttcggtgaaattaaagaatgatgaggtatcgtttcacctggaacgataatgttgaataaaaatggtgttccgtcttcttctagccgaactacttttaataagcctgtttttataaagtataaaggaccgtcctcgccttgacggaatagtacatctcctttgtgtagaatcaatgttagccccccattaatatgtttctatttcttctattttagcgtatatgtatatagacaatatgctatttcaacagcaatttcattgacgaaatgtatgctattacagtagtatactatttagtgtgtaatagtactagcaatgaatacgctgtagggggtttagtatattgttagatgcgatgagaatgacggatatgagaattccggcgaatgctatcattcatgtagaagagatgaaaggtggagtcgttttatccgttgaagtagacggccaaattatttatacgatggcttatgatgaagaaacagatagctatgctgaattatatgatcgaaacgataagagggcgtgccaagtacatgaagacttcatggggtggtcacttcttcattaaaaaagatgtcaatatgacatctttttttattaaatcgatagaatatacaaagaaatgaaatataaggataaaatttgtaataattgattttgcattgttagcactctgtaactgcaagtgaactattttttcgctatcataaagataacagtcgcagttataggagtggtcaacttgaagaaattacatatttcaaattatatgttattatgtgtttgcttaattttatttgttctcctcggaggatttttatattcatgtgtataagaaaaacgcattctaaaaagaatacgttataaaagggaaataatgattaatctagttccaagaataatcaacgtaatacgtaataaattaattacggcgttaccacttagttttgtattaatgtaagccccgatttttccgccaatccatgcacccggaatcaggattaatgcataaatccagctgacatttccaagtgagatgtgagttgcagaacttacaattgctgatagaaatacgatgaacattgaagttgctactgcaatatgtgctgggaatgcaaaaagaagcatcattgctggaacaagtaaggcaccgccaccaattccaaataatccagatataaacccaactataaaggcgataaagatagcaagaaacggtgggaattggtagtgtacagtatttccatcattatctgtaaaagaacgcttaattacagacgtatttgagagggaaagaggttttaatttgtctcgaagcataagtagaattgagacgaatataaggaaaatcccaaagtataaagaaaatgtgtcttggtttaaaaatttatttgcccatgatccgataataccaccagggccgcttccgataaataaaataagtccacttttataatctactcgcttatgcttcatgtaagtaagggtggaagatagtcctgtgaaaacgactgttaccatagaagtccctactgcaagttgtggtgataaactgtgtaatccaattaataacggaacaataataattccgcctccaagcccaactaggctgccgactgttccggcgattagtccgatgaaaagtaacatgatgtattccaaaattgccaactcctctaaataacttatccaccaattattatacacgctttttaaagagaaataggcttgttcacaaaaaagtcgtcttcctagaaaaataaggaagacgacttttgattagaaaacaaaatgtaataggtagtaaaacagagcagctaaagaagctgaaataggaagtgtaataacccatgtaattaacatgcgttttgcagttccccattttacccctttcacacggtgagaagcaccaacccctaaaatagaagaagagataacgtgcgtcgtactaaccggtaagtgaatgaatgttgcaccgaaaataacaagtgatgatgataaatcggcagctacaccatttacaggacgaattttcataatttgtccaccgacagttttaataattttccatccgccgacagaagtaccaagccccattgcgatagcacaagataattgtacccagaacgggatatcgctagaagtatgatagttattagccataagagccatcgtaatgattcccattgctttttgtgcatcattcgtaccgtgtgtgtaggcttgtaatgctgcagtgaaaatctggaatatacggaagttcttattcgtttttgttaagttaaagtttttaaatactactttaaaaatactgtatacggtataaccaataacgaaagcgataatcggtgaaatgattaaagcttcaataattttaataaatcctttaagatttagcgagctaatcccagcggccgcaattgctgcacctgcgattgagccgataattgcatgcgaagaactacttggaataccgtagtaccaagtaattaagttccaagctattgccgcaagcaaagcagctaaaattacaagagaaccattttgtaaggcgaatggatcaacgatatcttttgtaatcgtttttgctacacctgtaaatgtcattgcgcccaaaaagttcataatagccgccataataatggcatgtctaggctttagagctttcgttgaaacagccgttgcaatagcgtttgctgtatcgtgaaatccattgataaagtcaaaagctaaagcgcaaatgactactaaaacggtcagtatcaagagtgtatccatgatcaaactccttacgcgttcttcataataattgtttctaatacgtttgcaacgctttgacagctatcagctacttcttcaagctcttcgtaaatctctttaaattgaataatcttaatcggatctttttcacgagagaataagttcttaatcgcatgacggcgaatatcatcacactgtgattcataatccttaatcttaatcgcatttgtacgaatgtcgactaattttttgttagacattaattcaacagagtttgcaatctcaatcgcacattgattaattgcttctacgaatttaatcatgtattcatctgcttctgtaatagaatacatttcgaacagaccagcactgtgatctaatccgtctaatacatcatccatactcattgcaagttgtaggatgtcctcacgttcaatcggagtgataaacgctttgtttaactccataatgatttcgtgaataaatgagtcaccttttgactcatactctttcatgcgcatagaaaactcttttaaatcgctagcatttttaattttatactccacgaaaaactgcgcgccttcttttaaattttcggaaacattcattaacatttcagaaaatttatctttttttgatttaaagaccattattgttacccccacaaaagtaatatatgtaaaatatattggctaatcaattctaacaaaaaactgtcgttttttaaaacattttatcgaaaagtttacaaaaacttaacataactctcgttgttctattaataatattaatatccaatagtgaatatcttacttgtagaatgtccttttcttgcaaaaagtatgaatgtaaaagaaaagctttacactataggaatgactacgttattataataaatttaaaaggcggtatattcttccttttaaaaagaagagtgtaaataaatgaaggaagtgaacgaatgaaattgaagaacactcattttaaaaaaatgcttgagtggttcaataagaggaagaaacttcgtaattcattaattgtattgggaagtgtattcgttactctatttattgctgtaaatataataatttccattcaagacatatctgaactaaaacaagctgttccacaaccgactttaatttatgatgcaaataatgaggtcgcaactaaattagcttcttcgaaaacagaaggcgttaaaagaaaagatattcctgatattatggttcaggcaattgttgcagtagaagataaggaattttttaaccatcatggtatttattatagtggaattataagtgcggtttttaaaaatattacagcaggagaagttgtagctgggggaagtacaattacacagcagcttgcgaagaatgtatttctgacacaagatcgtacattttctcgtaaaataaaggaatactttttaacaaaaaaaatagaacgtacttatacaaaagatgaaattattgaaatgtatatgaatcaaatttattttggggaaggtgcttgggggataaagagggcagctaaatcttattttgataaagaggtaaaagatttatcaatttcagaagctgcaacgattgcaggcttaattaaagcaccatctgcatattcaccttataaaaactttaacaagtcaattgaaagacgtaatgtcgtattaagcttaatgaaagagcaagggtatatttctgacgaacagtataataaagaaaaagagagcggtcttgtattaaaacgtggtgtggatgataaatacaagggaaaatattctcaatatgtagactatattgttagagaagcgatggacaaatacgaattaacacaaaatgaaattttagcaggtggttatcgtatttatactgagcttgatccgaaaaaacaacaagctgtagaagatgttgtgaataatgatagttatttcaaagatagtggctcagatcaacttatgcaaacaggtgtagtccttataaatcccaaaacaggcggtgttccagctttagttgggggtagaggaccatatcagtttttacaatttaatcatgctacgcaattaaaaagacagccaggttcaacattaaagcctctagctgtatatgtacccgctttagaacaagggtatgaagtatacgatatattaaaggatgaaccatttaatattaaagaatataaaccacaaaatagcgatcatacttttcacggtgatgtgacaatgtatgaagctgtggcaaagtcgtacaatgtttcggctgtttggctattggaacagattggattagataaaggattgaaatctttagagcgatttggtattccattagtgccagaagatcgtacgtatccaatcgctttaggcggtatgcatgtaggaacatccccatttgtaatggctcaagcgtatagtacatttgcaaatgatggtgttcaagtggaagctcatgcgattagagagatacaaaatgcggaaggtgaaacgattggaaagtggtataagaaagagacacgagtgacaagcgagaaaatttctcaaaagatgacatatttattaaaaggcgttgtcgaaaagggaacgggtgaaaaggcgaaagttaataatgttgatacggccggtaagacaggaactactcaaattgtaaatggcccaagcaccggcgcaaaggattcatggtttgttggatacacaccagatttggtaggtgcgatttgggtaggatatgataaaacagatagcgatcattatgttccgggtggtagtcaaattacgacgacaatgttccgggatattatgaaaaaagcgaacgcaaatccagctcaaaaagcatttcagttatcgctcatatctgaggctgattataaaaaacaattgactacaatagaagaggaaaaacgaagaaaagaagaagagaagagaaggaaagaagaggaacaacaaagaaaaaaagagcaacaagagtggattgataaagtgaaagaatggattccttcattttggtaaaagaaagaggcgaataatgaaattcgcctcttttttgtatgaaaaacaaaatgaaactttaaacgattgaaattatcccttctccgtactagttactactcgttaagtataatgttcgtattgccaaaggattgagaatcgtatgtgacaattatttttcctttactaataggttcgtaaggtaattcttcttcgtaattaccattattttcattgtggatagaaagtgtaatttcatcgatttttttatttgtatactgatctttaatcgtttcagcaatttgaagtaacgcttcggaactagaagctttcgtaataagcattcccgttataactttcttttcattttttgttgcattggaataagggatgttgctttgtttcgtatacaaaattttgtatggaacagtttttctatctgcttttgaaatagtggaatattttagagttaaaaaaaatcctacacataaaataatgcataccataagagcaatccaaatgcgtatcggtgacataactctcatttttcatccctctttcatatctttgacttcattatttatcatacaaaatgaggattaagatagagtaaatttgaggtaaagaaacgtaaagaaggagcacttatcctcccaaacaagtgctcctttttattaaaagagagatttaatagacaatcaaaatcacatctattacttataaatgtgcttagtcctcccaaaatattttcggaaattgtggttagtaaattcggaagacagatagtgtcgcagttgtatcgcccgcaggtccttgagcgccttgaggtccttgagcgccttgaggcccttgagcaccagtagtccccgtagttcctccgcctaggcaaccaaatccatattgaactagaatagcttgaccaagagcttgaagaagtctaacaaattctgtaagttctgacttagggatgttaatatggttacatgctcttacttcgcaacaatcattaccataaaatacttttcctttatttttattgttcatcttttcattcttttctttcatagaatcatcagtcattactatatattaaaatgaaatttatactaaattcgtgatggacaaattaccatttctaaaaaaaataagaaattggcccacctacgaaagaaataagtaagatatagagaaaggtttatataatgtaaagaagaaaagtgcaacataaaaaactacatgctaattgttgggagtgtttaacaattggcatgtagttcgtggattagtcctttatttacattgatttaatttttcaagggttgttttaggtaagattggaattgaaatagtgaaagttgtaccatcttcattactagtcatttttaatgtgccgttatgattttggatgattttttttgttactgacaagcctagtcctgttcccgaatccttcgttgagaagaatggatcaaagatatattcttgaatagctggaggaataccaattccattatctgtgaaagtaatccgaatgaagttattaaggcgataactagtaatttgaatagaaagaggtttgtcgccttgagcatcgacggcattttgaaatagatttaaaaacacttgaacaagttcatgtcgatcaatattgactaaaatatcatctaattcattagagaagttataatcaattgaaatattatgcaaggaaacttcactagctagtaactgttgaatatagtcacgtaaaaatgtattgatgggaaacggttctcttgtaaattcccgtgtttttgaaatggctaaaaattttgtaataatattatttgcacgatctaattcagggataagcaagtttttaaataactctttatttgatggagaaatgctttcttgtaaaaattgtaagtatccgcgtactgttgtaagaggatttcgtacttcgtgtgcaattccagctgcgattcgccctgctaacgaaaacttctctgcatcacgttctgtatttaaataatgaaagacactaataactctaaaaatctccccgttataatcgcgaataattcggttatttataatgccatagtttttgtctaaaacttcttcattatatatttctgttcccgtttttaatgtttcaattgctttaattttttcttccggcaagtttagtaattgttgaatcggttttccgataatatgatttcgtattataccgaaatcatctgcagcaacttgattacataaagtaatattccctttactatcgataaaggttacatgatgtgaaaaggcatcaaaaatatgtacaaagtgtttttcaagttgttcaaataaaaataatgaatcacaagtaagttgaaaatgagcctctttattctcttttggtatttcttgaatggaatgagtcgttctagttttctttattcgtaaaccaatatgtggatttttgtatgtgaaatgatgtggtaattgattcacaagttcttcataaaaacgtactttattttctagttcttcaattcgtttttcatgagatacagtagcatcgtttggaagcataaataaataacccctcattttaaaaattcttccatatagtatatcatatttttataaggatactcttaaagaaaaggctacatgatgcaaagtgtttggaaagtgaattgaagatgaagttaaaagggaggggtatatgtgctgtttattggagtgacaggatggggagatcatgattctttatacataaatccctatgaaaatagaaataaattacgaacatatagcgagtattttcctattgtggaagtggatagttcattttacgcgatgcaacctgcacgaaattatataaaatgggcaatggaaacgccgaaagatttttcttttgtcgtaaaagcgtatcaaggaatgacgggacatatgaaaggtgaaattcctttttctacgttcgatgagatgtttgatgtgtataaacagtctattcttcctttaatagaagctgataaattaaaaacaattttatttcaatatccaccatggtttgattgcaaaaagaaaaatgtagattttcttcgatatacgaaagaaaaaatggaaggtttaccatgtgcaatagaatttcgaaatcaaacatggttttatccagaaatgagagataagacgttacagtttctagaacaggagaaatggattcatacaatttgtgatgaaccacaggctgggataggttctgtgccactcgtgttagaggttacgaattcagacatggcattaatacgttttcacggtcgaaatgttcatggttggcttgataaaggggaaaattggagagcggttcgctgtttatatcgctacaacaataaagaactggaagaatgggttgaacgactagagcaattaaaaaagaaaacaaaggatatatacgtactgtttaacaacaattcaggtggggatgcagcagataatgcgaaacagcttatgaaaatgatgaatattacatatggtgagccgaagccggagcaattaaatttttttgaatgataataaacaagaaaggcactgtacaaacagggggaatgtacagtgcctttctatatgaaaaagaggggtaacaatgttactgagcgtttggttgattcatcaattgttggcttcacaataaatgataatggttatcattatcattgtcaatggtttttctaaaaatatataaaaaactttatatattttaaatagagataaaaaaagaacagcgattaatgctgttcttttccattgacgaattgttgtaaatcaaaaggagttatcgcttggataaattcttttgagataagtgtttgaacgagagtgctctcagagatagaagcacctgtcttcttttcataagcttgttttaataaatcaagtttttcagccgtttcttttggtaattcaattgtaagtgtgttcataatttctcccccttattattagagtaccactacagtataggagagacaagaaaagagaatacgaaatataaaaaaggttaccaaattttaaaatggtaaccttttttatgtataagagttattaagcaataccgatatactttaaagtttttgatggagtactgtgatcaaagaagtgttgtaaaaacgcaatatcaacacctgatttgtatgcacaataaccccaagtttttcgaagtgtatgtgagctaatcccttctaatccaacttcttttgcggctttgtttaaaatgtaccatgcatgttgtctcgtaatagattttgttcctttttgagattttaacaatggttcattacgtttccaagttttacgttctttcatgtagtcttcgattgcgtgctgtaagtcttcatttacagcaaaccatttatgtttcttcactttttcattgtaaaataaaatggaatggcgaacattttcattttcatcgattacatcactaacttttaattgtaagatttcacttacttttaagccagaatttacagctaatacgaataataagccatcacgtttcgaagattgtaaaagtatatttttgatagtttctaattgtttttcattttgaataggttgtcctgcttgtttcatttcacgcactctcctcttttatatgtgtaaaggaaaggattaacttgtttcttactataaagggagagtgtgaatttcatgtgaactcctagtgaaattaagacaaattatttgacttcttttactttttgtaaattgaaatagaatacaacactgttagtcgtattatacacaccatactcggcatgatggaggtctaagatgttttttacaatagataatccgagaccggtacctccggtgtgacggctacgtgatgcatctagacgatagaagcgatcccaaattttttcaagactttcttcagggatagggtttcctgtattctcgatttcgacttttacggtatcttctgcttctataatggagacttgtattttttctccctctggcgtataacggattgcattacttagtaagttcacaactacttgttcaatgcgactgcgatttgctttaacaagtatagaagggtctgcatcgatgttcacttgtaaatgtttttcttccatgctaaataataattttgtgtagacttgttgcgttaattcaccgattgagaacgtcgtcatatctagtttgtaagtaccagattccaactttgctaattctaacatttcaacaatcagcctgttcatattttctgtttcttctaaaataacatcagtataatacgaagtatccttactaacaccatctttaattccttctgcaaaacttctaattacacttagcggtgtttttaattcgtgtgatacgccagaaatgaattcttttcttgttttttctaattgacgttcacgttcaatatcttgttgtaactttgtattagcaacatttaatcgatcgattcgatcttttaaatttacagataatgtattgatactgccagaaagcccgccaatttcatcgtcagctgtaacaggtaatttctcgctgaaatcaaaattagccattttttttgtaacacgatttattttaattaatggcttaacaatgatttttgagtagtagaaggataacaaaataattacgagaaacacgatgattaaggcatagacataataatcttttaaaacgagcatcgcttcattaacaggctgcaaagatgctatcgcaaaagcgtattctgtaatccttccattttctataatcggttttacaaagatactattttttatattttctccgccatctaatatgaaagtacttaattggttcgagttagaagttccctctctaatcatatctgcaaaatattgaacggcttgtaatgtttcaatatcatttgcaagacgaacctcagctttggatgggagctgtaacttagttataacacctgtaaagacgattcgagttgtagatttgtatcggcttgcaagtctgttcttagaagggttaccattaattgactgaaaatccgaatagaaatgttcgttctgccattgattataattcgtccctaatttttgtggtgtgattatattattctcttgtacgactccatcaacattgattattacatctttttttaaacctaaattttcgaatttattatattcttctggtgttaaaagattattgagtggaatggaatactgtttattattgttgggattaaatacatcgatatagtaattgttatcacttttaataataccgttagagtccaaaaactgcatatcggcatttgttttatcatgaaattcttgttttagttttctaacctgctcataatttttatcacttttatcataattatctacgaatttttcaaaagcagtttggactgtttttactttcttattaatataaaatttctctaaaaatagagattgtcctaggaaaaaaagtaggaatatgattgtaaataaagtggatgttaataaaaatagtttaaagacgatacttctgtttttcactacgtcacctcttatgagaaatactgtaaatgatttctttatcccgctttaacgggcaataagactcccacttcaaaattcggcgaatacaagggagttaagtgggaaaacaattgcccgtaaaatccgattggttcaactaataatcagtgggggatggaaaaaacctccactgattaaagtttcactttattataacaaacgttacaagaaagtagaggggagaaatctgtctctttataaagtagttatttataaaaagtcacataaaaagaactcgccagacgtatgacaagttctttagtgtattattgttgaattgctgcatctaaagcgatttcaatcatttcgttaaatgtagtttgacgctcttcagatgttgtttcttcgccagtgaagatgtgatcgctaactgttaatacagataatgcatttacaccgtatttcgctgctaatgtgtaaagagcagttgtttccatttctactgctaatacaccgtaatctccaagttttttaaccatgtccatgctttcacgataaaacacatctgctgttaaaacgttaccgacacgaacgtgtaatcctttttcagttccagcatcataagctttctttaaaaggtcaaagtttgcagctggtgcaaaatcaaatcctgggaatgttaaacggttcatattagaatcagtacaagccgtcattgcgataataacatcacgaacttttacatctttttgaattgcaccgcaagttccaacgcgaattaaatttttaactccgtagctttggattaattcgtttacataaatagaaatagaaggaacacccatacctgtaccttgaacagatacacgttttcctttataagttccagtaaaacctaacataccacgcacattattatagcaagtaacgtcctctagaaatgtttcagcgatatattttgcacgtaatggatcaccaggtaatagaatagattcagcgatttcgccttgttttgcttcgatatgtacactcataaaaaagtcctccttataatgtattgatagaaatcaatatcatttgcattatacactacgaatcctttcaattaaaatctttttattatttgtaatatgtgcaaaataggaggatttcataaatcataatctagaatatatatcttaagaagttttgtatgaatagagacaataaaaatggtaggtgatgttttgaaaaatcttgtcatcgggcttattgcgttagtacttattgtggcaggaggattttacataaaaaaatatcaagaaaacgaagagactgtaggagatgttcaggaagtaaagtgggatgtttcaaatggaaagggaaatgagaaagtagatattgtatttcagttgttaaacaacaagaataatgaaattcgtggtgtaaatgatcaaatgcgggcagtgattgtagatggacagttaaaaaacatacaacaaattaaacccacatttgcagggaacgggtcatataagttatcttccaaaatagcgaaagacgaagaatatacaatatttttatacgaagataaaaataagtccgtagagtcattcgctaggaagaattttggtagaacgaaagaggagaacaataagaaaaaagtgaaatttccaatcgacagtgtacttacaaaaaaaataggagagtatgaagtttctcttttatttggcgcattacatccgaatgaaccagttacgttaacatttcagtttcaagcgaaaaagggtgaaaaattgaaattgcattcagagagaggagaagtagagtcactctatatagtggatgaaacgaaggagaattttttatacgctatgcctgtagatacggatgaacaattacaataccgaattacatttcctgccgagggcacgtataaaatgtgggggaatttctatataaatggtaagaagtatgaaaaagaatttattgtacaagttcaaaaaagaaaaaacagctaagaatttagctgttttttctttttcctattaattttgttacagagagcattgtaattggtaaagaatgattcttcctaaatgctaaatatttaccgctccatgctggtttatatttttctttaaaatgtcgtaatccgctgaaactatacgtataacgaacgttattaaagattgcagcagccactcgttcagaccagaaagactgtgtggataaaccaacatttgaaagtggtgccataccgatattaaaggagtggtattcattttcttttgcccactggaataagtggatgaaaattgcgtccataatgccgctaggcgcatctggataatatcgcattaaatcgacagataatgatccgttttgatatacaggcatgaatgttgtgaatgcaatgatttttccatccgaatcagataatgttgcgataggagcgcgactaatatattcacgatcgaagtatccgagtgaaaaacctttctctttttttccaccaagccatgcatctgaaacttttcttaactcttcatataattcgtcggagaaaggtggctcatgaatagagaatgtatagccttctctttcaaaacggttgaaagtagctcgcatgccagcgcgtttctttcctgttattgtaaaggtatttaaatcaacaacagcttcttcaccaagcttaaagaagttataaccaaaatcgtggtataaactcatccatttactttcaatttgatagaatacacaaatgtatccaaatcgatcagcctcagctaaaaactcttgcaatacagtacgataggaggaagggtccccaattggatcacctagtacaataagtcgttttccagttattgagaagagaatgagtgcttttccatcactactgaaaaagaactgtttatctcctaaaaaacctaaatgactaagtacatttccaccatgttcatctaagaagttttgtaatcgtttatcattagctggttgcccgggaaattcatttcgataacgatttgcaatgagtgaaccaattagtaaaaaagtaggaacaaaaaaggcagctgctaatgcacttcgtttcacttgtgtaatattacgaacgacaaaatcaggtttgaaagcttcttttgcacctgcaaataaaatacctaagtttttatataaatataacgttacaagtaggaatataaaaacttttacgatatcggaaagtgagacttccattttctcacgtacaaaccttttacgaagcatatacaatacagcgagtacgattaataaaataaaagtttcttcaacatcaattccttttagtgtgttaaaaatagccgctccgattaaagaaacaatcgtcatataataagaacgttttgttccgtaatatatcccccgcgaaagaatgaggaggagaataccgaatgttagcgataagctaaaagaaaattgaataagatgttttggagctagaatatgtaaggcgtgtgcccgatttatacttgtcggtagaatggttgataaaataaccattaagccagcaaatactgttaaagcagcagatgcccaagaacctaactttcctagaaagtcacgctgcaaagtccatataacaccagttgtctctaatgcaggcgcaataaaaggtttatcttcaaactttttaatggctactcctgtcatttcaaaagctgcaaaaatgagaccaaggcagaagggcaagatgtaatagacgagacgatataataacatagcagggagtaaaacacctgtatcgatgccgtattgcccaagcccagttaagaagacaagatcaaatgatccaaggccaccaggaacaagactaacgacaccagctaaagcagcaataacatatacgcctaaaaacttttggaattcgatttcaatgccaaataatagtaatatgacgtacataacaataccagcagatacccattcgactaatgaaactaatgagtataaaacagttgggtttttctcctcttcttcttcttgttcctctgtttgcgtcgcttttctattttttaatttagaaaatccgatatatatagggacgaaaagagcgaagaagataagaacaggccatagccatggtttttcatgcaaaataaatctcgtgtctaatattccgatgagaccaagaaatgaaagaatggctaatccattaataaaggcagttgtcatccaagcgatacttttaataagttttccattttcttttatatatggacgataaagcattgtgcgtacgccggctccaacaagaccaccaaacccgataaatccatttaaagtattagcaatccacgagatacggaaaatcttttggacagggatatcagcttttaagtaacgaagcataacatagtcataaaagaacattgttgatacagcgaatgcaccaagtgtaattgctaaaaagactcctccagttggaatgtttttaattgtatcaatcgcttctaaaaaagaaatgcccgctaattctttttttgcttgaaagaatacaattgttaatacaacaaatgggaagacaattttcccgatttgtaagaaacgtttccatgaaaacgacataaatacaactctccttgtataagaaaactgagacaataatattattatgacaaacttcaagaaaaataaaaaggtaaattcctgtataggcgagctattttttatataggtatatttaaaagaatattttgtttatcagaaaattaagttagaataagatgaaagaaggaggaggggagtatatgattataaaaggttatgtaggatatgagttagaaaaagcgaaacctaatacatcagaagatttttttaacagatctgaagtgacatatatattaaatggtaaagagaaaactttttcggttttatacgttcgatattttgaagaagttttacaagaaattactccttttgaaggaaatccagtgtataaagtagaagaacaaaacatatatttgcgtgatattgtagcgatatgttgtttagtgaaagataaggagcttcgtgcgcaaaaacgtttgtatttaaataatatggaagaatttcaacaatattttgatgagggaacggtgtcgaaagtacaagaaatattggctgaattacataaaaataaaagagtagaaatagcgtgaaatggcaaaggagagagaaaaatgtctaatttgatggttgaaaatcaaacagaacaagtttctatatttttagaagatgctattaatttgataaccaattatgtaaattatcatacgttaccttctttattagaggaaacaccagcagggaatgagcaatattataaaggggtattagcatcaatgagacgacttctcgttttttgcgaagaaggacaggatgcatgttttgttttgttgaatagccagccatttcgaaaaacagcagctgaaaaaattttatataagatttaccatcaagtaattgcagagtttttttcaccgaagagtgatcattggtatgaaaatagtcggtctgcatatacagggaaaaattctatcgtttttcaacaaacaccacctgcatctttggagcaagtgatgaagagtttagaaggtaaatttcaattgatgcgtgaagaactagaatattatgagacggattatcagacaaagatgttacacaaatattgattgaggaaaagaagctaaggtgacttagcttcttttccttttgtacagttatataagggattttcattgaatatagttaagtggatagcattagggaggtgcaacatgaatcagcaaggtgtatttacagattactttcatgaagtagaaaattggtgtgaaagtgttcttcacgtattagatagccgcgcaatggaagtgtatgatgtccatatgcttgcttataaaattcagacgttattagagcgtatgaaagagcatgagtatgaaacagatgcagagtttatgtatgaaataagcgatgatgtagaacacattcagcatcacttgcaggaagtatttatgcaagaagaagaggaatatgaattatatgaaagaggggatagtgaacgagctgtcccaattggaggacatacactcccgccattaccttatccgtataatgcattagaaccgtatatttctaaagaaattatgatgttacatcatgataaacatcatcggagttacgtggaagggttaaataaagcagagaagatgatggaagaagcgagaaaaacaaataaatttgatttaattaagcattgggaaagggaagcggcttttcatgggtcaggtcattacttacacacgatattttggaataacatgaaaaaagacggtggtggaagtccaagaggagctttttcacaacaaattgaacaagattttgggagctttttacgtttccaaaaacattttacagaagcggcctctaaagtagaaggttcaggctgggcaattctcgtttgggtaccccggtctggaaggttagaaattttgcaaagtacacttcatcaattatttacacaatgggatacgataccgctccttgtactagatgtctgggaacatgcgtattatttacaataccaaaatcgaaaagatgaatatattaaaaactggtggaatgttgtaaattggcctgatgtagaaaaaaggtttgaaactgcgaaacaaattgaatggacaccatattagacgcaaattctctgcgtcttttttaatggaagtagaaggaagatttcgttcatattttaaaaggccaagcatacacttgtacaaaaagtgccaaaaggacgtggggggaaatatgagacgaatttgtgtaatcattacgcttcttatgatgtatgcaagcgttatgccgattcctacatatgcaaagatgaacagcaatgtcagtgctcgaaatgctgtattaatggagcaacagtctggtcgtgtattatacggaaaagcagaacatgagcctcaaaaaattgctagtataacaaaaattatgaccgctttattagctgctgaatcagggaagatgaaagaaatggtatcagttagtaatgaagcggtgagggtggaaggatcggcaatctatttaaagcctggacaaaaagtgaagttagaagatttagtatacggactcatgcttagatctggtaatgacgcagcgcaagtaattgctgaaagtgtgggtgggagtatagatggattcgtatatttaatgaatcaaaaagcgaaagaaattggaatgaaagatacgcacttctcaaaccctcatggcttagatggagatggatcacattattcgtctgcttacgatatggcattattaacgaaatatgcaatgggaaacgagacatttaagaaaatctttggaaccaaaacatataaatcagattcttgggattacccgtggaaaaataaacataagctggtaacgtcttattatgaatttgcaacaggaggaaaaacaggctttacgaagaaagctgggcgaacgcttgtgacaacggcatcaaaagatggactagatttaattgtcgtaactttgagtgcctctagtgattgggatgatcatatgaatttgtttgataaaggttttgaacgtttcaaacaaacgaaagttttaggacaaggagcaattgctgaaataaatgaaaagaagtatgccaaccatgtttatacgaaaaatagtttttcggtaccgttaactgaagaagaaaaaaagaacgtagtattaaaagttgaactccataaaagtataaaacttacggatggagtaaaggttgggaagacagacatttatgttggtaatgaaaaagttggagaacggaatttattttatagtaaacggaagttagtagctacaacgggactttactggaataatgtgaaagaaattttttcttacatgataggtgttgggaacgatggttaatctcgtatgggtagcgatggctgtcattgggattgtatacgccatgataaatggcacgatggaagaagtgaataaagctgtatttgacggagcaaaagatgcggtaacgatttgtataggacttattagtgttttagtattttggctcggtttaatgaaaattgcagaggaagccggattgttaaaaaaattagttacactttttatgccgatagtaaaaaggttgtttccagaaataccaaaggatcatccgtccatgggatttattctatcaaatatgatggcaaacttttttggtctaggtaatgcagcaacccctcttggtattaaagcgatggaacaactgaaagagttaaatggaggacaggattcggcgagccgttctatggtgacgtttctagcattaaatacatcagccattacattaattcctacgacagtcatttccattcgaatgacgtatgaatcagcgaatcctactgaaattgttggggtaacatttattgcacaagtactttctatgattggagcaatttggattgaccgctatttttaccgaagaaggagtagaaaggggcggaaaaaatgagtattgtaaatacaatttccttatgggtaattccttgtgtaattggttttatccttttatatggcacaataaagaaagtaccgacgtatgaatcgttcgttgagggaggaaaagaagggattcaaattgcaatttccatcttaccgtttatggttggaatgcttgtgtctatttctatattccggtcttcaggtgcgttagatgcaatgatatcggtaatgaagccaatgttagatttgatccatgttccagcagaaattgttccactagcacttatacgccctatttcaggctctgctggtttaagtattacgaccgatttaattgccacatatgggccagattcgtttattgggagattggcttctacgatgcaggggagcacagatacgactttctatattttaactgtatattttggagcggtcgggattagaaaaatgggtgatgcactaaaagtaggactttttgcagatttaatcgggattatatgctcaattgtgttcgtttctttattgtttcagtaatactattcattttttacgctatttcgcttataatacgtatacgaccactattaaggtgtagcttaatagtggtttttttatgtggtatttttgacaaaatgatgaacttttattgtgagaaatatgaaaaatatggacaataataaagggtaaaaacatgatttgacctttatatgtttattatcatcgctatgttgtttaagtaagatgaagcgaatagccgtaaagcgtatgcggttgccaagtctttctaatgtaaggtaagataaattcgaggtgaaaaaaagaaatggaacgattacaaaaagtgattgcgcaagcaggtattgcatcgagaagaaaggctgaggaattaattcagcaaggaaaagtgaaagttaatgggaaaatagtgaaagagttagggacaaaagtaactcctcaagataaagtagaagtaaataacatccctcttgaaaaagaagaacctgtttattttttactatataaaccaactggcgtaatttcaagtgtatcagacgataaaggaagaagtgttgtaacggactttttcccggaaattacacaacgtttattcccaatcggacgcttagattatgatacgtctggcgtattattaatgacaaacgatggggacttcgcaaacgtattaatgcatcctagatataaagttgaaaaaacatatgttgcaaaaataaaagggccattaacaggtgagaaaattcgcatgttagaacgcggtgttacgttagaagacggtaaaacagcaccagcacgtgtgaaaattatttcttgggacaagcgtaaagagatggctattgtacaattaacaattcatgaaggacgtaatcgtcaagtacgtcgtatgtttgaagcgttagactgtaaagtagtgaaattaaaacgtgaacgttatgctttcttagaagtaggaagcctgcgacctggtgatgcgagagaattgacaccacatgaggtgaaacaattacgcgcgcttgcttctacaaagccaagataagctatagagttaaaaattcaccagtggagtgctctgctggtgatttattcaatacaacatttacagaagataatacataacatttatcgaggagaggagaagtaatatgaagaaaaatcgcttattatttcgcgttattattctactcattttatgtggtgctgtaggatttaccctttatcaaggattctttgctaataaagagaaaatgcaaatcggaaaagaagcacctaactttgttgtgacggatttagaagggaagaaaattgaactaaaagatttaaagggaaaaggtgtatttttaaacttttggggcacgtggtgtaaaccttgtgaaaaagaaatgccttatatgaatgaattatatccaaagtataaagaaaaaggtgttgaaatcatagcgttagatgcagatgaaacggatattgcagtaaagaactttgtgaaccagtatggtttgaaattcccagttgccattgataaaggacaaaagattataggaacatatggagtaggtccattaccgacaagctttttgattgataaagatggaaaagtagtggagcaaattataggtgaacaaacgaaagaacagttagaagggtatttaaagaaaattactccgtaataaagaaagcctttacataaggggtgcgtgtctatagtgcctctggtttaaaaattctgagtattgcggtaacttgaggttagaatatacaatagtacatatagatacaggggcggtgagagtgttgaaagaaattaaatgtgaatgtggacatgttaatccgataggaaccgttttttgtgaagcttgcgggaaaccatttgaaagcaatgaaaatacaaaactattggatatgcgctatgaggggagtgcacggagatctctcacgcagacaaaaacgataatcgataaaatttggagctttttctcttctgtaaaagtgggtgtatggctaatcgtaataactttagctgcatcagcgataggaactatttttccgcaagaaatgtacataactccagggattgcaccagctgaatattataaacaagaatacggatttttaggacaattatactatcaattagggtttaataatttatacggttcatggtggtatatgattttgattgcttctatcggtatttcacttgtgatatgtagtttagaccgtgttattccactttataaagctttaaaaaagcaaggcgtaaaaagacatcctagctttttaaagagacagagattatatgggactggtacaccgcaagaaggtgacctggaaagagtgcaaaagaatttaaagaaaagaaactataacgtgaaagtggaagacggaaacgttttagcagaaaagggacgcttctcgcgttggggtccatatgtaaatcatatcggtcttattatctttttattcggtgcgatgcttcgttttttaccgagtatgtacgtagacgaagcactttggttacgtgacggtgaaacgaaagagataccagggacggatggacaatactacttaaaaaacgagaaatttataaaagaagtttatgataaaagtaaggacaaggaagtttttgatgaagcgattaatcgtgtaggcgataaaatgattgcgaaaaacttccaaacgaatgccgtattatataaagcagtaggagaaaatatagcaggacaaaaaccgaaattagaaaaagtaaaagaagcggaaattcgagtgaatgaaccactgaaatttgatcaatttgcagtgtatcaagtggattataaagaaagtgaatttaaaagtatgtcctttaacttacaaaataaagaaaataatcaaaagtggggaccgattaaagtagatttaacgaatcctaaggaaaaatatgatttaggaactggttattctctagaactattaagctattttcctgatttttattttgatgagaatggaaaaccaaatacgaaaacgaaattaccaaacaatcctgcatttgtatttaaaatgtttacacctgaaacaccagatggcgaagtgagttttgttggtattcagcaaaatatagaaccagatggaaacaacaaatataaaatgtcgtttgcaggtgttgaaatgcaaaatgcaacagcacttactgtaagaaaagatttaacgctttggattctcggcattggaggatttatatttatggttggtgtcattcaaggtatgtattggaatcatcgccgtatttggatacaacgtgttaatgatgaatggtggattgcagggcatacaaataaaaattggttcggtttaaagaaagatattgaaagagtaatagaaggtacaacaattccacagccaaatgataaagtaattgataaaaaaattagttaaggtggggaaacgatatggtgcaaataagtagtaactttctctttaccgcatttattttatatttaattgcgactctattttttggaggagccattaaagaaaagggtcataaatgggcaaatgtaggaataacgattacaattttagggtttatagcacaaacagtatattttgttacaaggtggattgcatcagggcatgcgccagttagtaacttttttgaattcggtacatttttcggcatgatgcttgtaggagcatttattgtcatgtattttatgtaccgtgtaagcataatcggactatttgcattaccagttgcgcttttattaattgcctatgcaagtatgtttccgagggaaatatctccgcttattccatctttaaaaagtaattggttacatattcacgtgacgacggcagcagcaggacaagccattttagcgattagttttattacaggcgttatgtatttattgaaaaatgtagatcaatcgacgagaagtaaacgtacattttggctagagacggtagtatttacacttgtttgtacagttggatttattggagtaacaacggtattttctagtatgaaatatgaagcgaagtttcaatggattgataaaaatgaacaacaactggaaatgaagtacaatcttccggctttagttggaccgcatgaagggaagttactgacagaaaataaattagaaccggcagttgaagttccagcaattgtaaatgcaaaaaaattaaatactgttatttggtcagtgttagttggaacattactgtatattgtattaagactcgttttacggaagcgagtatcggcggcacttcagccgttagtaaagaatacgaatagtgatttactagatgaaatcggatatcgatctattgcaattggattcccagttttcacattaggtgcattaatttttgcgatgatttgggctcaaatagcgtggacgcgcttttggggctgggatccgaaagaggtttgggcacttataacgtggctcttttatgctgcagtactacatttacgattatctaaagggtggcatggagagaaatcagcttggcttgcagtaattggttttgcaatcattatgtttaactttattgtagtaaacttaattattgccggtttacattcatatgcatagagaaataaaataggagagtgcatgtcactttcctattttatttttgtcaacttttcttcttttttgagaaaaacatgacaaagtagcggttgattttgtaaaatgatgtcgaggacattatatacagttcaaaaaaaatacatagttttggaaaaaaattgaacaaaatttattattcttgtgaagcataatatgggaagtgaaacatttagaagattgcttaaataaacgagaatagcgcaacataatagttaaagaagggtaggtgtgaaccgctgaggtgagagtacgcagcgggtagagatggaaaatgaatcaagaattttaattgtagatgatgaggatcgtattcgtcgtttattgaaaatgtacttagaaagagaacaatatacgattgaagaagcagataatggtgatacagctttagaaatggcgttgcaaaatgattacgatttaatcttattagatcttatgatgcctggtaaagatggcattgaagtatgtaaaggggttcgtgagaagaaagcgacaccaattattatgctgacagcaaaaggtgaagaagtaaatagagtacaaggatttgaagttggaacagatgattatattgtaaagccgtttagtccacgtgaggtcgtgctacgtgtgaaagcggtattacgtcgtgctgtaccaacaacattctttacacaagatacaacgacaaaagatgttactgtattccctcacttaacaattgataacgatgcacaccgtgttactgcagatggcaatgaagtaaacttaacgccgaaagaatatgagttactattatttttagcgaaagctcctgataaagtattcgatcgtgagcagctgttaaaagaagtatggcaatatgaattcttcggagatttacgtacagttgatacacatgtaaagcgtttacgtgagaagttaagcaaaaaatcaccagatgcagcgaaaatgattgttactgtttggggtgtaggttacaaatttgaggttgtgaacgactgatgctttggagaagtgtagtagggaagttatggatgaccatattacttctcgtttcgtttgttcttggatttgttgcgattttactttcacaattttttagaacgtattatgttgatatgagtgaaaatagacttcaaaaagtcgcaacaagtgttacggaattaattgaagaaggtgccgatgtaaaaacgattgagaacatcgcgtacaaattctctgatccactttcaaggattattattgtagaagatggcaaggaaatctcttcttcaccgaaacaagaagggttagtcacccttacaatggataatttaaaagaagataaagaattagccgctgtttttacggacaaaaaagaaattaagaacaacattagaaaagcttctgatagtagaaagaataaaagcactgaaaatgatattgtgatcgttgggaaaccagtgcaatcaaaaaatcaaagcgcagtgttcgtatatgaatctttacaagtgccaataaaagatatggagagaacgactgatttcattttcttagccgctgggattgcgattatattaacaactttctttgcgttcttcttatctactcggattacagcaccgcttcgtaaaatgcgtgaggttgcttttgaagtgtcacgtgggaaatttgatgcgaaggctcctatggtatctcaggacgaaattggtgagctggcaacggccttaaatcaaatgggtaaacagttgaagtttaatatgaatgctttgcagcaagaaaaagaacagttagctagtattttgagtagtatggcagatggagttattacgttaaatcaagaaggtgaagtcgtagttattaatccaccggctgaacatttcttacaagtttggcaagaagaaaaagagatagagttaagtaaaaaattaccttctgaacttgtggaactattccatctcgttgtagaaagcgagcaacaacaagttgttgaaattaatttacaaaaagggaactatgtagttcttatgacaccactttacaatcaaacgaaaattcgtggggctgtagcggtactgcgagatatgacggaagaacgtcgtcttgagaaaatgcgtcaagactttattgcgaatgtatcacatgaacttcgtacaccgatggtcatgctgcaagggtatagtgaagcgattttagatgatattgtgcaaacgaaagaggaaatagatgagtttgttcaaatcatttatgatgaatccgttcgtttaggtaaacttgtaaatgaattgttagatttagctcgtatggaaagcggtcacgtagagttacatattggtgaagtggacatacatccgtttgtggaaaaaattggtcgtaaattccaagggattgcaaaggataaagaagttgaactaacagttgatttccggaatcagattgaagaatatgcgtttgatgcagatcggatggaacaagtgttgacgaacttgattgataacgcaattcgtcatacgaatgcgggtggacatgtaacgcttgtaattgatacgaaaaataatggcctcatttttgaagtacaagattcgggtgtaggcattccagaagaggatattccatttttatttgatcgtttctataaagctgataaagcaagaacacgtgggaaaaagggtggcacaggactcgggcttgcaattgcgaaaaatattgttcaaggccatgacggtaaaatttctgtatcaagtgttgttggagaaggaactacattctctgtatatttaccgaatcgtataatttagatatgcttttttaaagttgataatgaataaagttctgctgttttttatttttttgtaaactcaattaaataaagaatggtagaacttttttctatcttggtcgaatcaagaataacaagagagggtgctgtgaagaaatgaaattatatacaaaaacaggagataaaggaacgacaagtgtaataggtggcagggttgataaagatgatatccgtgtggaagcgtatggaacaatagacgaggcaaattctcatattggatatgcaatgactaaggttcaaggcggggcttttagagatatttacaatgagctcgaaaatattcaacatgaactatttgattgcggaggagacttggcaatagtggaacaaaaaattccttataaagtgacaattgagatggttgaaagtttagaaagaaagattgatttatatatagaagaagccccgccattagaacgctttattttgccaggtggtagcgaggcggcggctattattcatattgcacgtactgttgtaaggagagcagaacgctctatagtatcattgcaaaaagaagtgaaaataaatgaagttgtcttaaagtatgtaaatagattatctgattatttgtttgcgatagctcgagtaataaatgcccgattacaagtgaaagatgtggagtataaccgtagtgcattagtttttcgtgataagaaagagaaggaagtggagtaattcactttctttttttgtatacttttttctgtaatataccaaaatagagaaggtatggtggtaattagaaaacggaggatgtatatgaaagttttaaaatgcggcgtcatgttattgagtatgctgtttgtatctcaattacatgtttatgcagaagaaaatcgatggacatggcctgttgaaggtcagataagtgattattttgggacaaggcatggaaaacactatggtattgatgtagctgcgccgattggaacgcctgtggcagctattcaagatggtagggtaacgaagtcttattattcaagtagttatggaaatgttgtatttattaaacacggagaatatgaggctgtatatgcacatttaaataagagatatgtggggcaaggagattatatttccaaaggagaaaaaattggagaagtagggaacacgggagaatcgcgaggtgcacacttacatctagaacttcatcaaggaagatggacgatggcgaaaaagaatgcgatgaacccattgcttgttttaaatgaacaaagaaatgaagttgtttcttcatcattatatgtcgtacaaaaaggggatactttagttagtattgcacggaaatttagtatgacacttaaggaaattaaagaaaaaaatggattgcagcaagagctaatttatcctaatcaacaattatatgttaagtgaaggaaacatttcaaaaattaaactttgaacaaatttatgttcttcttaaataaggttcaatgtaaatgaaattatatgggcgcttttgctagaactattgagtgaattagagcatctatatctaaaagaaaaccgtcccaaaatttattttgggacggcttcttttaccaaaaaataaagacacatataaatccagaaatagctaaatagctatataagtaaaaaacttttgttcttgttttctcttttgttcgaaacagtacgatagttggttcaattaaaccgattgtcaaacaaagtaggccaagaagcatacaaccaatcgaaatagaatacagggcgatttgtggtgcttgaaatggaatcatccattttaataaaaatgcaataagtgcagtgtaacaaatactaccgatgtatttattcagtggtgtattagaacgaaaaccaggaagtttttttaagaaagagcgggaaacaacttctgtttgtaaagatgtatgctcttcaataattttttgagcttcttttcctttttgaaaaagagataagatccaatttcgctcaccctgaaaaataaattgagaagttgtcaaatagtgatcaatcttcactttattccaactcttccacggatgacgctcacacatttttaatttactttctgtttttttatcatactgataaatactaatgccatcttcatcgaaagtagcatagtatgtctcgtttgagaatgtgcctaaatcaattgggcagtagaaaagtaattctttttttaagtaaaagtattcttttcttaagttttttttcattgcttctcgaatagaatgtctcttgtcttttttcatgacatttcctccataactcagaaaatgttcttatcttaacaattcaatatcttatcacttttaattatatatgactaggtaattcaaaagagaaatgccgaataataaaaaatatggattgtattgtaaaatatctcgcaatttatttgtcgttacgaaaaataaataactaattttaaataagttacaattttttagttcacaatgttatgaggttgttgtataatgaaggggaaaatagaatatcggtctatcttcggggcagggtgaaaatcccgaccggcggtgatgaactatttatgattttgttctaagcccgcgagccgttaaggcaggatttggtgtgattccaaagccgacagtatagtctggatgggagaagatggaggttcaagcgttcaaaaaagatatggatttgaacgtctgtttgatgtgccttaaattctccctttgtgtaaaacacaaagggttttttcgttctatgaaaaaataggcatagcagaacctttccactttccatgagatgatcgatggaaaaggagagagaaagatgaaacaaaaaaacagtgtagtgcagatggtgagtgtagcgatgctaagtagtattgcatatttactaatgatgttagatttcccgttcccagggcttccgccatttttgaaaattgattttagtgatgtaccagctctaattgcagcaattatctttggaccagtagcaggagtgattgtagaggcgataaagaacattttacattacgggattcaaggaagtttaacgggagtaccagttggagaaattgcaaactttattgcaggatgtttatttattggaccagcagctttcttatttagaaagtatcgtactgtgaagagtttaactacaggattaatgctagggacaattacaatggcacttattatgagtgtattaaactacatcatcatattcccggcttacacttggtttttaaattcaccggctatgtctagcgaagctataagaacaacggttgtaacggcaatcttaccatttaatttaattaaagggattgttgtaacaattgtatttgtagcattattctcacgcctgaaagtatgggtgtttgcaaaaatgaaaaatgcataatatatatatatataaaccattagtagtgtgaaactactaatggttttttattaaggaaaataaaatttagatacaaaaaatgcccctcatcaatatgaggggcattttttgaagttaataaaagactattcgaattttaaagcgtctccgtcaaatgattcgtcagcaactttaattgagtcagttggacagccttcgaatgcatccatcatatcttcaattaatacatctggaatttcaacgataccttggttatcatctaatgttacaaatgcaataccttcatcatcatagtcataaatgtctggtgcagcagcgccacaagcaccacatgcaatacaagtatctttatcaacgattgtatattttgccatcttttttccctcctgataatatgtatgtgaaaagctcgccataaaaattataaccttattgtaaaacggtttgtaaaacttttcaacataaaattataatgataatgcttatcaattagagtgtcaacttatttttgaattatgtcataagattttcaaaatacgtaaatatgatttcgtttgatacaatagaatatatacaagtatatagttcttatatgataagtttaatgagcgaaagtagatagtgtaattgtactgaaaagaatgaagttaagattggaaggtggaagcggtcatgcaaatacaatatactttgttgcattgtttaaaacaattgaatggtgaaagaaccgtttcttctatttattatttactaaagggcaaacgttcttcgcaaactttacaagatggaaatatgttccgaatttcttttttgttcggaatatataaatcattgaatagaaatgactatgatggtgaagttgcaaagttgttgcaagcgaattttattcaagaaatacatgaaaatacatatgtgttaacacctacgggtaaaatgcagttacataaatggggggaagtttatgcttttccggcgcatttgcatggtttacattatggtgaattaggtgaaacattttggaaaagattatcattaattattcaaaccatatcaaatttacaacagaataatacgaagtttatcccaattcagcaagatacagaaataatgatgtgggtgaaacgttttctaacaggaataccatataagagaagtgagttggcgagaaaactatggacggaagtacataatcttttagaaaagagcaatacgatagaagcgacgattgtaacatatcgactaacgggttatgaacgtattggttgtacattgcaacaattagcagaaattacgaaacaagatatattcagggtgtattttttattttggggtacaatgcatttctttatacaagaagttcgtgataaagaaaatgaatttccactattagctgaaattatatcttatccaaatgagagagctgaattatttagtttatccacgaaaaaaacatataatttttggagacaaggacgttctttagaagaaatagcgacgattcggaatttaaaggttgcaacgatagaagatcattttgttgaaattgctttgcgagaaaaagatttttctattgaaatgtttatggaaaaagaaaagatagacaaagtaataaaagtaattgaagcattgcaaacgcggaagttacgtgttttgaaacaagcggttggagaagatatctcttattttgaagttcgtcttgtattagcgcggatggagggtgtaaatgaaacttgaagaatatttatataagtggtttggatattctgaatttcgtccaggtcaaaaaggagttattacagatttattagaaggaaaagatgtgatagcaatgcttccgactggaagagggaaatctatgtgctatcagtttccggggcttatgcgagaaggaacagtgcttgttgtatcaccgttattatctttaatggaagatcaagtgacacaattaaagtatgttgtgaaaaaccgagtaatagcatttaatagttttcggacattaaatgaaaaaagagaagcgatgaaaaaattatcttcatataaatttatttttgtttcaccagagatgttacagtcggagttattaattaaggaattgaagaaaattcatatttcattatttgttgttgatgaggctcattgtatttctcaatggggttatgattttagaccggactataaaaaactaaatgtagttattgaaaatattggttctcctacagtattagcattgacagccacagcgacaaaaggggtactgcaggatatcgcaaatagtttaaatttaaagggtgccgcagaacatgtatactctattgaccgtcctaatattgcaatggatgtgcaatttgtagagacgatagaagaaaagaaagaggcgcttttagagcaggtgatgtatttacaagggccggggattgtatattgctcaagtagagcgtggacagaaaggttaacggaatacttgagaggaaaaggtgttactggtgtagctttttatcatggtggtatggaacatgaagagcgtatgttaattcaacagcagtttatgaacgatcaactgcaacttgtaatatgcacaagtgcatttggtatgggggtaaataaggcgaatacgcgatatattattcattttcattatccaactaatatagcttcttacttacaagaaatcggaagagctggaagagatggcgaaccgagtatagctattttattatgtagtccgttggatcatgatttaccaatttcaatcattgaggatgaattgccaagtaagtcacaaatacaatttttattttctttactacaagaaagaatgtttcaaacgaaagaattaccaatagaagatgtagaagaaatttgttataatgcagcaagatttaatgagcaatattggcgtttcgttcgttatcatctcgaacaggttggaattatacaacaacgaagattattattagaaggtttgtcagatgaaattatgaaccgattaatagctgaagtagaaataaggttgcgtaataaatatagtgagctagaaaatatgaagtcatggatacaagttaaaggatgtagacgtgaatatgtgctgcaacagttcggttataggaaagagcaagagttaattaattgctgcgattattgcggtattacaaaagaagattataaaaaaagacgagcgcaacaatcggatttcgactataattgggaaacagagttacaaaagcttttcggcctagaaaagatggaggaatgatgaacattcaaaggcataatgttgaagatatgagtccgcaggaaataaggctgaatctatatataacacagttaattattatcggtattggctgtttactggcatatatattatttcaagatgtaaaagaagtctttaatttatggaaatgggaaccagtatctatacttattataggtggtttgttagcgattggtattgtgttattagattatgttgcaatgcgagtgtttccggagtcttggtttgatgatggtggtattaacgataagatgtttcgaggaatgtccgttctgcatttactcgttattacgttcttaattggttttgcagaagaatttttatttagaggtgtagtacagactcattttggaattgtaattgcgagcttcgtatttgcagtgttacatattcgttatataacaaagccatttttgttttgtttcgtctgtttcattagttttgtctttggttatgtatttgaatggacaggaaatttgtttataacaatctttgcacactttcttgttgattttataatgggactccaattaagaaaataaatggaaggtggtggtgaacaacatgaggaaacgaattcctgattttgaagaggaattagaagttgagcgagtggaagaaaaagaaagtttaccgccgcgtagtgaaattcatagaaataaagaaaaaaaacaaaagtttaaaataaatcacattttcgtccgggttttaacatttctattcattctgctgccaattagtattttgtggtacacggataaatatattcaggtgaagggtgatagtaataatgccggaaaaagtgcgtttgaagtaatcttctttgattcagctaaatctgagtcgcagaaacattctgaaaaagtaataacgcatactgtgaaagagggagaaactttagaaagtatagcgaagcaatatttttcagatggaaatggaattgaagtaattaaaaagtataataacttgcaagaagatgaagtgagtgcaggtcaagaattaaaaattccgataaaagataagtccgcaaagcaagaaagctagtgagttaagcgatcacagtttgttataaaagcctaggattatctttatgaggaggggagtcaaaaatatgatatggattatattattcagtactctcataggcatggggattttattgcttcttgtgatgtataaagaagcgatgcgtaatacggtgttggaacatactttagtatttaaagaatttccgaaaagttttcaaaaagtaaatgtgttttttatttctgatattcatagaagagtcatttcgaatttgttaattgaacaagtaaaaggaaaagtagatctcgtaattatcggaggagatttagcagagaaaggtgtctctttatcaaaaatctctgcgaatattcaaaagttaagagagatagctcctgtatattttgtgtggggaaacaatgattatgagatagaatatcatgaattagatgcgttattattagaaaataacgtaaaagttttagataatacaagagtggtatttgagtctgaattaggagagaaaatttgtttgctcggtatagatgatgttggattgcaccgtgatcgtctagatttggcattggcggattgtaaagaagatggttttcgtatcctagttagtcacaaccctgatataataaaaaaaatgtctggaaatgaacagatttcacttgtgttaagtggacatacgcatggagggcaaatccgattattcccatctaaaaaatatttaaaaggtggcgtatataaccatttaaatacgattctctttgttagtaatgggtatggaacaacattgataccacttcgtttccgagcacctgctcaaacacacatcattacattgtgcggagggaaatgatgccaactcttagtgggaaatataatataaaagccgtttcgaatataattggagttcagccgagtacgcttcgtgcatgggaaagacgatatcaaattattgccccaaagcgtaatcaagctgggcatcgtttatatacagaagagcatattcaaattttaaaatggttaatggaaaaagtttcttccggtatgatgattggacaagcagttcgattattagaagagaatcgtttgcagagtacagttcaaaaagagatacatttcgataaagaagttgttttagtggacgatttgctacaagctttgttaaaatttgatgaaattacaattgctgcattattaaacgaagcttttagtatatattcaacagagaaggttgttgccagtattgttcttcgagtgacagacaaattattaacgtcaaaaaataataatgagatttcaatggtgcaatttcaatatgcactatcatttttacaaatgcgtctagggatggtgtatcacaatgcctcaatgttttcctctttacacaaagttattgtgttagaaaaggatgcattgaaaggatttattttttcaacttatttacgcttaaaaggatatgaggcgatatatattaggacaagcttagctgaagatggtatgttatcagcggtagaggaaatacagccgaaatatgtatttgtatcttttgctgacgaacaagaaatgaaaaagacgatgaactttataaatttattacaagaaaaaagggaatctcttttagttggatttatcggaaagctaggcgttctaaaccagttggacattgaaacaatcttaattggtgatacgaaagaagaatgggatggatggttaaaaatgtcggaatagttgttcgaaaagaaccatctattttctatttcatataataaaaattagatgcattggttacgtagggagggtatgagatgaggctggaacgattaaattacaataagataaaaatttttctaacatttgatgatttatctgaacgaggattaacgaaagaagatttatggagaaatgcaccgaaagtacagcaattatttcgtgatatgatgcaagaagcaaataaggaattagggtttgaagcagatggtccgattgcagttgaagtgttttctctacaagcacaagggatggttgtaattgtaacgaaagaaaatcaagaaatggatacagatgatgagttccgtgacgagtttattgaaatgcaagtgactctagatgaaagtgagcatatattatatgagtttgctacgctagatgacgtaattaacctgtcgaatcgcttatataaccttggtgtaactggcggaaagctatatacgtgggatgagcgcttctatctttgggtggaagaagaggaacaaattcaattgttaaaggcggattttatagctattttagcggaatacggtaatccgtctacagcaaccatttatcgcatcatggagtacggtaaagaattaatggatgttaacgcgatagagcaaatacacaattacttcgtgaaaaaacaaaacctcagctaatacaacatagctgaggttttgtttttatttggagaagggaagggatgattgtaaatactcgaacatactttttgaaaataaaatatgcagttttatgggagtgtggttgatgaaaataaaaaatatttaaatatttaagtattttacttttctaaaagtaataaaaggactataataatagtgaaaacgcttgcaacagaaaatagtttgtatatatttgttagcgttttctattgcattccaaatttaagggtgtatactaggcaatgaaggtttactaaacaagtgaaattacagggggtttacttactatggtagccgaaaagggaactcaaacaaaaacacaacaacaaagggaacaacattttgaactattgaattcaacacaaattgttattagtgaagcgttagaaaaattgggttatccaaacgaagtatatgaattattaaaagaaccaattcgtatgatgacagtgaaaataccagttcgtatggatgacgggactgttaaaatatttacaggatatcgtgcacaacataatgatgctgttggtccaacgaaaggtgggattcgcttccatccgaatgtaacagaaaatgaagtgaaagcactttcaatctggatgagtttaaaatgtggtattgttgatttaccatatggtggaggtaagggtggaattatttgtgatccacgtgaaatgtcattccgtgagttagaaagattaagtcgcggttatgtacgagcaattagtcaaatcgtaggaccgacgaaagatattccagctccagatgtattcacaaactctcaaattatggcatggatgatggatgagtatagccgtattgatgaatttaattcaccaggatttattacaggtaaaccgcttgtattaggtggatcacatggacgtgaaacagcaacagcgaaaggtgtaacaatttgtattcgcgaagctgcgaaaaaacgtggcattgatattaagggtgcacgcgttgttgttcaaggattcggtaatgctggtagcttcttagctaaatttatgcatgatgcaggtgcgaaagttattgcaatctcagatgcttacggcgcgttacatgatccaaatggattagatattgattatttattagaccgtcgtgatagcttcggtacagtaacaaagctatttaacaatacaatttcaaacaaagaattgttagaacttgattgcgatattttagttccagctgcaattgagaaccaaattacagaagaaaatgctaatgatattaaagcgaaaatcgttgttgaagcagcaaatggtccaacaacattagaagcgactaaaattttaacagatcgcggaattttacttgttccagacgtgttagcaagtgctggtggtgtaacagtatcttactttgagtgggtacaaaataaccaaggttactactggactgaagaagaagtagaacaacgtttagaaaaagtaatggtaagatcatttgattctatttatgaaacagcacaagttcgtaaagtgaacatgcgcttagcggcgtacatggttggtgttcgtaaaatggctgaagcaagccgcttcagaggttgggtataaaatattatatcttgagaaaacgtgatttcctttcgagggaatcacgtttttttgttgaagtattaaatgaggtgttgtatatggagaatgaaatgctggaacgagtagaacaattagaagaaaaggttaataggttagagggagaactcgcaagaacgatgaaagctcgcaaaataagtaccgttcggatgttcggggaagggctactgtttctgatatttggtgtggttgtagtagggccgattattgccgttgtaatctcaatttttacttggcttgctgaaaaataaaataaaataaaaataaaaaagaacgcttgttctatgcgaacaaacgtgctatactctccttagataaacaaaacggaaatgattttaaggagagataaatgatgaaaatgacagtagaccaaagatttatgatgccagcagatgttgtagagcgagtggaagtattacgaaacaaacaaagcaagcgtggcacattattacaatcggtaaataaatttttcggtttagatacgaaagaagattgtgtttggttttacggtttttatggagtggctgtaagtatcttgttgtttatggtgttcacttcaaatattttcgattttctcttcgcgtaagaaatatgcgataaggacattgctaccgaatacatatataaggaagtaaggtaatcttctagagcgggagttggtagcaatggcgatgtttcctatagagcgcaattatattggatatggaagttcacgaccggggattcctctgactaaagtgagatttatcgtaagccatgatacggggaatcctggaagcaatgcgataggcaatcgagattactttaatgaattacaaccgaaagcttcggcacatacatttatagatgataaaacaatattggagattattcctataaatgaagttgcgtatcatgttcgatatggtgtgccgacggataatgacttatatggctatgacgcgaataaggcggccattggagtggaactttgttatggtggtgatgttaacttttgggaagcgtataatcgttttacatggtatcatgcgtatttatgccaaaactttggcttaaatccgaaaaaagatatcgtgtcacataaaacgcttgatccagctagaaagattgatcctgagaatgtattagggaaacaaggtattaaatttcagcagtttttagcagatgtctatcggatgtacgtttcgtttagatgacaaatatatgaaaaatgaatacaataaagataggtgcctactgctgtaagtaggttttttcttgtttttataaatagtgcattggtagaagactaggagtggacgagtatgcagaaagaaacagttattataatcggaggcggtccgtgcggattagcggctgcaatttcgttgcaaaaggtagggataaatccgttagtaattgaaaaaggaaacattgtaaatgccatttataattatccaactcatcaaacatttttctcttctagtgaaaaattagaaattggtgatgtagcttttattacagaaaatcgtaagccatttcgaaatcaagcgcttgcgtattatcgtgaagtagtaaaacgtaaatctgtacgtgtaaatgcttttgagcgagtggagaaagttcaaaaagatggagaagtttttcaggttgagacgacaaagcgtgatggaagtaaggaaatgtatatagggaaatatattgttgtagcaactggatattatgataatccaaattatatgaatgttccaggtgaggaattgaaaaaagtagctcactattttaaagaggggcatccttattttgatcgagatgtagtagttataggtgggaaaaactcgagtgtagatgccgcgttagaacttgttaaatctggtgcacgtgtaacggtactgtatcgtggaagtgagtattcaccaagcataaagccttggattttgccggaatttgaggcgttagtacgaaacggtacaattcaaatgcattttggagctcatgtgaaagagattactgagcatacattaacgtttacagttgatggtgaagcttttacaatcaaaaacgattttgtatttgcgatgactggttatcatcctgatcatagcttcttaacgaagatgggtgttcagattgatgaagaaacaggacgtccaatttatacagaggatagaatggaaacgaatgctgaaaatattttcattgcaggtgtcattgctgctggaaataatgcaaatgaaatatttatcgagaacggtagatttcatggagatgcgattgcgcaaaccattgcatcaagagaaaaataaaaaggagctgtcgggaaaatctcgacagctcctttttattcgtgcataaacatattttgaatggattcatgagaatttgtattctctaatgcaacaagtaatttaatgcgtgctttttgtgcatttaagccgtatgtgaatacaatgcccatatcttttaagtgtttaccgccaccttcatacgaatatacgtcttgaacgataccgttgaaacagcgagaaactaatacgacaggaatacctttatttaataatctttctaggctaggtagtgttcttggagggagattaccttgtccaagagcttcgataacaatgccgtctacaggaagattttcgattgctgctaataatgtatcatccatgccagcatatgcttttagaacaactacatttttagacactttatttatcgtatatgattcgcgatgtactaaagcgtgatggaagacaacgccgcgttttgttaccattccaattggtccgtattgtggactttggaatgttgcgacattacttgtatgtgttttcgttacatttgtagcgcaatgaatttcgtcgtttaatacgactaaaacacctttttctgcagcttcatcacaactagcaacttttacagctgataagaagttatatagaccatcagcacctaactcattactagagcgcattgcacctgtcactacgatcggaatagttgcttgtactgttaaatctaagaaataagctgtttcttctaatgtatccgtaccatgcgtaataactacgccatgaatgttgtcttgttttactctttcatcaatgatgacttgtaattgtaacatttcgctcggtgtcatatgaggagatggtagatggaacacatcttcaacgattaaatcaacatcgccttctaaatcaggaatgaattttaaaagaggattttttttacctggttgtacgaccccagtttctttatcttcctccattgcaattgttccacctgtgtgtaaaactaggattcttttcaatgcttatacccctttcaagtaaaaaaatacatttagaacataacatgttttgagtaaattcgacaatggaaatgtataaaagtatgcctcgaaaatgacaataaaattaactgctatatgtacgatgtataaaattacgaaacgaaatgtgcaaatatagtataggagggagaaattacggtgaaaaagatggagagaatttttattcgtatattaataatacaattcatttgtctttctgttgtacaattgttatttatacataagtcatcagtgaaatatttatctaaaatcgtttattatgagggtgttatggtaaaaaacaaagtggaaatcttgcaggtgaatcggtagttttcattttcttctatgaaggattatgctacaataattgaggatttaatgacgcgaagcaaatgagaagaagcagggtgaacacctgcttttcgttttgttttataagtgaaaaaatgaggtgttacaatggataaacgaatttcaattgctatagatggtccagcagctgcagggaaaagtacagtggcaaaagttgttgcgaaggaactttcttatgtttatattgatacaggcgcaatgtaccgtacgcttacatatgcagcccttgaacaaaaagtagacattgaaaatgaagagcagttaatggaagttgtaaagaatgtaaatattgagtttcagcaaggagaaaatacacagcttgtatttttaaatggacaagatgtttctgaagtaattcgtacacctgatgtgacgaatcgagtatctattgtagcgaaacatcgccttgttcgtgaagaaatggtacgtcgtcagcaagagttagcgaaaaaaggcggcgttgtaatggacggccgtgatattggtacacatgtattaccggatgctgaagtgaaaatctttatgcttgcttctgttgaagaaagagcggaaagaaggcatttagaaaatttaaataaaggtttcgattctaatttagagcagctaaaagaagaaattgctcagcgtgataaattagattcagaacgcgaagtttctccactaaaaaaggctgatgatgcattggaattagatacgacttctttatcaattgaagaagttgtccaaaaaattatgagcattgtttctggagtgtttgcgaaataaagaaaggggataatcctctttctttttttgtttaaatagaaatgtaaaggatacgtgaattatgagtctctttccttgacaaatgagctgatttgtaagaagttagttaaagaggaataaaactgtcagaatatattcgctattatatttcaaaacatacttttttcaagctggttttgctgtatactatttatataggtttaatatattttcttgtgaatgttattgaaaaagagtatgtgatgagaaattcttaaacatgcaaatgaaaactttgttttcatttcgtatatacataaaaaatgctttgtcaattctgtagggaggtatttccatggtagagaaaatgaatgaagaagttatggattcaaaagaattacaagttggtgacgttgttacaggttctgtaacgaaggttgaagagaaacaagtgcttgtaaatgttggatacaaaacagatggcgtaattccaattagtgaattagctaacgttcatattgaaaaagcaagcgatgttgtagaattagatcaaacactagagttgaaaattattaaattagaagaagatgatcttgtcttatctaaacgtgctgttgatgcagaaaaagcatgggtagaactacaagagaaatttacttctggtcatgtatttgatgttactgtaaaagatattgtgaatggcggattagttgtggaccttggtgttcgcggttttattccagcttcacttgtagaagtacattatgtagaagactttactgactataaaggtaaaacattagcggtgaaaattgttgaattagaccgtgaaaaaaatcgtgtaatcctttcgcataaagcggtagtagaattagaactagattctaagaaaaaagaagcaatttcttcattaaaagaaggggacgttgttgaaggaacagtacaacgattaactgactttggcgcattcgttaatgttggtggagtggacggtttagttcacatttcacaaatttcacacgaacgtgtagagcaaccttctgaagtgttagagcaaggtcaaaaggttaaggtaaaggtgttatctgttgatgctgatacacaacgtatttctttatcaattaaagcagctcaaccaggaccttgggaaaacgttgctggcgaaataaaagctggagatattcgtgagggagtagtaaaacgccttgttacatttggtgcattcgttgagattttaccgggcgttgaaggacttgtacacgtatctcaaattgcaaatcgtcacgtgaaaaatccgaatgaagtattggaaatgggacaagaagtaaaagtgaaagtacttgaagttcaagtagcagagaaacgtatttctttaagtataaaagaagcgcttgaggaaaataatgtaactgaagattatagtcagtatgagccaaatgctgattctgctactttccaattaagtgatattattggtgaacaactgaaaaaattaaagaaataatgaggggtacaagtggtaagggcaaaacgtaaattagatcatattgaatacgctctttctactggtcagtctcgtacgcatggctttcatgatattgattttgtgcatcaaagcttgccaaattcaaattatgacacaataacatgtgaaacaaaaatcggcgaactttcactaagttcgccgatttttatcaatgcgatgactggtggtggaggagagaaaacgttacatattaatgagcaattagcatatgtagcgaaacatcataaccttgctatggctgtaggttcgcaaatggcggcgttaaaagatgaaagtgaagctgcttcttataaggtgatcagaaaggtaaatccaaatggtattttctttgctaatttaggtagtgaggcaactatcgaacaggcagagcgtgccgttgatatgattgaagcgaatgcattgcaaattcatttaaatgtcatacaagagttaacgatgccagaaggagaccgtgattttactggagtacttcagcgcattgagaaaattgttttaaatagtaaagttcctatcattgtaaaagaagttggatttgggatgagtaaggaaacagtgcagcagttagcgaacgtaggtgtaacagcaattgatattggtgggcaaggtggtacgaattttgctgctgttgaaaatgaaagaagacagcgaatgctttcttattttaataactggggcatacaaacagcaacctcgattattgaagcaacctctacaaataataacctctcttttattgcatctgggggcatacaaacagcgcttgacgtagcgaaagcgatcgcattaggggcgaatacaactgcgtttgctggttactttttacgtattttaatgcaagatggtatcgagaagttagtggatgaaattgagctcctacatacagatttgaaatttataatgacagctcttggtgcgaaaacgatagaagagttgcaatctgtacctcttgttgtaaagggtgaaacgtatcattggttaatgcagcgtggtattgatactgcgcattatagtaggagataaaaaatcaaccgttcggttgattttttttgttctattctttttcgtaatataaagtggagaaaggaattagtattatataaaaatatcatttcgtaaaaattgcaattgaaaaagggttgaaaaatgtagatggtgtgttgtcgaattactggagagaacttaatttttaataggaataggtgaagataaaaagaagtaatgggaggatatagtgtgtgaaatattatttcaatataaatagaaaacattaaactgattatgtaaaagacggtttcgtacaatatcgaaaccgtctttttgcattaattagtgctggttttgttttcgagcctgttctggtgtatcaagtccagttgcacctggatattgtagtgattgatcacgatcggattcaacgcggcgtgattctcgtagttttcgttcttggcgatctttacccataatgaataacacctccttgttaaaagtgttgctgttataagaaaaaactatgcgtaaataaagtggattaactttcataaaaagttcccataatggaaaacataggaggtgaagttgatggatggaagtactttttattttgtagcttggatagggtggatcattgtaaccttttttatgaaaaaggaccttattcggtggaagttaggcgcttgtatactgatttttataatttgctctccgttacatgtaacgatcgcctcattcgtggtatcagtaaatgctcttttactttgtattatttcttttatagggatcacgctatattctgtctggaaaaaattatatagcttactttcggcacttattattgcaatgttatatacaagttttcatctgttagaaatatatgatccgatttggattgtggtggatagagtgtttctgctaagtagtggtcttgtgtatgcatcggtgttattgcatggagatcgcatattacgattatgttctctatatgtagggatgttacaaggagagctgctagtgacatttatttttaggaaattgaattttccatatgattacggtagtttagcattttttgatatcgtcgccatttctacattattcatggcaatattgttttggattgcaaaagcatcagtatacatggaacggtttaagagaaaaacacgtaaaagaaaggcgagggtaatacatgactgaatatacaccagccattttatgcggcgtaatagcagggacagttacaagggtgctaatgcttcggacggatacacggcaatatccgacgaggctacatgggaaaattattcatattgcaatggggttaattgcagctgctttaggagcgattgcaatcccgtctattttgaaaaaagatttttctgccattacatttcttacattagcagcgacacaatttcgtgatgtacgtaatatggaaagaaatacgcttcaacaattagatgggtatgagctcgtaccgcgtggaaatacatacattgaaggaattgcattggtttttgaaagtcgcaactatttggcaatgttaacgtcgtttgcaacgacgtttgcgtatataggattccgttcatggattgcaggagtaattatggctataatcgcattttttattgcgaaaaaattaatgtctggtaaaaggctacatgatcttgttgaaattgagcacgttccgcttcgttttgaaggagcagggctttatattgacaatatttacattatgaatattggattgccagcaagacaagaagaaattatgaaatatggtatgggttttattttaaagccgaaatcaattgatgcgatggttacaatctcaaatttagggcaacgacaagctattttacacgatgtttcagtagcgttagggatttatagagattctggtacaccagcgcttgtaccgttagcaaagcgtgatttagaggatggcagggttgggatttttgtcctgccgcaagatcaagatgcagagaaagcgataggtgtcataggaaatgtaccaacgttagaaagtgctgtccatatgtcatcggaagccccgaaaggaaggggagataagagatgatgttagaaagtgttattctggcagttataacaacgactccagaaaaatttgcaggtggtgctcctttattcgtttgcgaatcgacagaggaactagaatttgttgcaaataatttagaggcaattttagatggtattgcacatcgcttacaagagaatgtatatattattgtgaaacattagcaacgtgtgttataatgtgaggtgttttgatacgttgagaaatattctggaatgcaaatcccttcttgcacaaagaagggttttttacataataaacagaagcaagttgaaaggatgaaagtatatgccgaaaccagtaatagcgatagtaggtcgcccgaacgtagggaaatctactattttcaatagaattgttggagaaagagtttcaatcgtagaagatattccaggtgtaacgcgcgatcgtatttatagcgctggagaatggttaaatcatgaatttaacattattgatacgggcggaattgatattggagacgagccgtttttgacacaaattcgtcaacaagctgaagtagcaattgatgaagcggatgttatcatttttatgacaaacggtcgtgacggtgtaacagcagctgatgaagaagttgcaaaaattttatatcgttcaaataaaccggttgtacttgcagtaaataaagtggacaatccggaaatgcgcagtgacatttatgacttttatgcattaggatttggcgaaccattcccaatttcaggtacacacggattagggttaggtgacttactagacgaagctgcacaacattttccaaagattgaagaagacggatatgatgaagacacaattcgtttctctttaattggacgtccaaacgtaggaaaatcatcacttgtaaatgctcttcttggtcaagagcgtgtaattgttagtaatgtagcaggaacaactcgtgatgctgtcgatacaccatatagtaaagatggaaaagattatgtaattattgatacagctggtatgcgtaaaaaaggaaaagtgtatgaaagtacagaaaaatatagtgtacttcgtgcgctaagagcgattgaacgttctgacgttgttttagtcgttttagatggtgaagaaggaattattgagcaagataaaaaaatcgctggatatgctcatgattcagggcgagctgttgttatcgttgtaaataaatgggatgcagtgaaaaaagacgaaaaaacaatgaaagcatttgaagaaaatatccgtgctcatttccaattcttagaatacgcaccaattgttttcttatctgcaaaaacaagaaaacgtacacaaacattaataccggttatcgatgaggtaaatgaaagtcatagtatccgtattcaaacgaacgtattaaacgatgtaattatggatgcggtagcgatgaatccgacgccaactcataatggtagccgtctgaaaattttctatgcaacacaagttgcggtaaaaccaccgacatttgttgtgtttgtaaacgatccagaattattgcacttctcatatgagcgtttcttaaagaatcgcttacgtgaatcatttggcttcgtaggaacgccgattcacattatcgctagagcaagagactaatggagaggatgtgattttatgacaaaaatcacagtagtaggagcaggtagctggggaacagcgttagcgatggtattagctgacaatggacatgatgtacgtatttggggaaatcgcccagaacttatggatgaaattaatacgaaacatgagaatagtcgatatctcccaggcattacattgccaagcacaatcgtagcctactcttctttagaagaagcattagtagatgtaaatacagtactgttagtagtaccaacgaaagcgtacagagatgtattacaagagatgaaagaaattgttactgaaccaattacttggattcatgcgagcaaaggaattgaacctggtacgtcaaaacgtatttcggaagtgattgaggaagaaattccagagcacttaattaaagatgttgttgtactgtctggaccgagtcatgctgaagaagtcggtttacgacaagcgacaacagttacgtctgcagcaaagcgtatggaagcggctgaggaagtacaagatttatttatgaatagttatttccgtgtatacacaaatccagatatcgttggagttgaacttggtggtgcgttaaaaaatattatcgcattagctgctggtataactgatggtcttggattaggtgataatgcaaaggcggcattgatgacacgtggtttaacagagattgctcgtttaggaagaaaaatgggcgggaatccgttaacgtttgctggtctaactggtatgggagacttaattgtaacgtgtacaagtgttcatagccgaaattggcgcgctggaaatatgcttggaaaaggacactctttagaagaagtgttagaaagcatgggtatggttgtggaaggtgtaagaacaacgaaagctgctcatgaattggcagagaaaatggaagttgaaatgccgattacagctgctttatatgacgtgctgttcaatgggaataacgtaaaagatgcggtaggctcattgatggggcgtgttcgaaaacatgaagtggaagctatacctgatttactgtaaagaaaagcgacagaagtacatttgtacttctgtcgcttttttattttttgggtcttttcaccattttttcatttttgcataggatgaagagtaacttgaggagagggtgaaaagaatggataataatatttttaataatattgagaaggaagcgaaagtaaataaagaggatatttttaaattagcatcatccgtgcaaaatgcgaatttacgtgatgaaactgtacttcgtcaattaattcatcaagtggctcttatggcgggacgtgaagtgccgaaagagcaagaggatcaaattgtaaaagcgattattaataataatatgccaacagattttggctcgttaagcaaaatgtttaaaaaataaattatgagaaacaaagagtttgtagattgcatatgatagccatgaaagaatgggaatagagctgtttttgggcatatttggtcaaccgaagtgagaggtacaatcgcttcggttttatttttgcctagattggtgaaaaatgctggaaaacctattgattaaagttatatattcgcaatttgtagtaaaatgttctttttgtatttgtttaaagattttaatttgttaaaatagtataaaaatagattgataaaaaggggtgtgtatatgtcagaagggcttatgaaaatgtggttagctttaggggcaattggatttatgttttttgcagtaagttttattttattaagtagacataaaataaagaataaatttttgaaagggattacagcattagtagcgtacacccttatgattgtgtcaggaattgttatttttcttgttgtatttagtggacctgtacagcagtaaatggaatggtctcgaaaatactacatacagagcaaattagattagtatgaaaaggtgatgctagtgaaaaaattacatattattttaatattttgttgtatgagccttttaacggggtgtctgtatccgaaagaaaatatgaagcaaaatgcggttccttatgaagatcagctacaggttgttcaaaaagctgttgtgacatttaaggagcaaaatgatgggatattgccaattaagacgagggatatgagtacacctatttatcaaaagtatccgatcgattttcaacagattgccccgcgttacatacaagaagcgccagggaatgcgtatgaaagtggaggagtatatcaatacgtattaatagacgttgaaacaaatccaacagtaaagttaattgatgttaggatggctgaacaaattcaggaactatctttaaagcttaggatgtatcgtgatgaacatcaatatccaccttttaaaaaagtaatttcagatggtgtatatgaattagatttcaaaaaactaggatataaagatgtgccacaagtgacaagtccatattctggtaaaggacttccttttgtaattaatgaaaaaggagaagtttttgttgattatagaatcgacttatatgacgctttgaaaaaaaatgaagggcagtttacggagggagaagatattcgaaatatactttcgaaaggttccccgtttgtaccagcttattctttaccgtacacagtaaaggatggagaaccaatttttttaaaatgataagtcatgaacctttcttttagtgaataagttctagaagaaaggttttttatgttatacaacttacgatgcaaacaaaagatattttttaatagtcatatgaaattggacaaaattatatgatatattgtccgaacttctagaataccattatattatatcagatattataggcaacgttagagaaggtattagttgactataaacgcggaattattcccaaaaattttgagggagggaatcacttggaaaaggtagatatttttaaagatattgcagaacgaacaggcggtgatatttattttggagttgtaggagctgttcgaacagggaaatcaacattcattaaaaaatttatggaacttgtagttattccaaacattgagaatgagtctgaccgtcaaagagcgcaggatgaattgcctcaaagtgctgctggtcgtacaattatgacgacggaaccgaagtttgttccaaaccaagcggtttctatcgaagtagatgaaggacttgaagtgaatattcgattagtagattgtgttggatatacggttcctggagcgaagggctatgaagatgagaatggcccacgcatgattaataccccttggtatgaagaacctattccattccatgaagctgcagaaatcggcacgcgtaaagtaattcaagaacattcaacaattggtgttgtaattacaacagatggaacaattggtgaaattccaagaagagattatatagaggcagaagaacgcgttgtaaatgagttgaaagaagtaggaaaacctttcattatgataattaatacggtacagccgtatcatccagatacagagcaattacgccaaagtttatcagaagaatatgatatcccggttattgcaatgagtgtggagagtttaagagaaacagatgtatataatgtacttcgtgaagcactatttgaattccctgtattagaagtgaatgtgaaccttccgagctgggtaatggtgctaaatgaagggcattggttgcgtcaaagttatcaagaagcagttcaagaaactgtgaaggatataaaacgtcttcgtgatgtggatcgcgttgtttggcagtttagtcaatatgaatttattgatcgagcgagcctagctggcattgatatggggcaaggtgtggctgagattgatttatatgcgccagatgaattgtatgatcaaattttaaaagaagtagtaggagtagaaattcgggggaaagatcatttattaaagcttatgctcgatttatctcatgcgaaaatagagtacgatcaagtggcggatgcactgcgtatggttaagcaaacaggatatggtgtagcagcgcctgcattagcggatatgagcttagatgagccagaaattattcgtcacggttcaaggtttggtgtgaagttaaaagcggtagcgccatctattcatatgattaaagtagatgtagagtcaacgtttgagccgatcattggtactgaaaagcaaagtgaagaattagttcgttatttaatgcaagattttgaagatgacccgttatcaatttggaattctgatatatttggacgttcacttagctcgattgttcgagaaggaattcaggcgaaattatctttaatgccagaaaatgctagatataaattaaaagaaacgctagaaagaattattaatgaaggatctggcggattaattgcgattatactataagaaaaaatccctctcattgtagagggattttttgtttttttgattataaaatagaaaaataaacagtcattatctaatacattgttgtaaattgtcaagtttcatcagattttcacattttcagagtaacaatttccttaaaaatattgaattataaaggagaatcgtataatataggcgttgataatgatttatctacatctttgtagtatagaatttgcaaaaattgcctacaaatgaaagtaagactcattttatgatcattatacagtcttatctttgggaggaggtgaatggcatgaacaagacagatttaatcaatgctgttgcagaagcaagttccctttctaaaaaggacgcaacaaaagcagtagacgctgtttttgattctatcttagaagctttaaaacaaggtgataaagtacaactgatcggattcggtaacttcgaagttcgtgagcgtgcggctcgtaaaggtcgtaacccacaaacaggtgaggagattgaaatcgctgcaagtaaagtacctgcattcaaacctggtaaagcgttaaaagatgcggttaaataatccttacatattaacagggaagaagagtttcctttttgggaactcttctttttgcttttaaaaacataaatatgctagaatgtgttcgtatcacttttaggttttcgggagggctagcggatggcaaaagttaatttagaacaaattgaacatgcagtacgccttattttagaggcgattggggatgacccaaatcgtgagggagtacttgatacaccaaagcgtgttgcaaaaatgtacgcagaagtgttctcaggtatgcatgaagatccgaaagagcatttgcataaagtattcggagaagatcacgaagagcttgtactagtaaaagatataccattttattcgatgtgtgagcatcatttagttccattctatggagttgctcacgttgcatatattccgcaaggtggaaaggtgacagggttaagtaaattagctcgtaccgtagatacaattgcacgtcgcccacaactgcaagaacgtattacatcaacagtagcgaactctattatggaagtactagagcctcatggtgtaatggtagtagtagaagcagaacatatgtgtatgacgatgcgtggtgtaaaaaaaccaggtgcgaaaacagtaacgacagcagtgcgtggtgtgcttgaaaatgatgctgcagcgcgcagtgaaattttatcgtttattaaaacgaagtaaagaaaagcgggaaactgcttttctttttttttttagtaaataaatgatatagttttaactagacagagtgagattagaaagattgcttacatgaatggtaggtgtagccaagttttggttatagaaaatagagtgtatgtgttataataagttttatgaattagaaaacaagggtgattttttgtgtgtgacatctacggagggtatgcgagtataaaagaaaaattgatggagaaattacgccatccttactttataaactatattgaagaaccatttattgatgaagaaaagatagcattgttatatggtgctttaaagagtgcaaacttacatatagaacaaattgagcattacgtagtaacaattatgcttgtacaaattgcgcttgatacgcatgaaagggtatcaaataaagcaggcgaggaagagattgaattccataaatgtcgtcaattaacagtacttgcaggcgattactatagtggactatattattatttattgtctatgaatcgtgatattgttttaattcgtgcacttgctgaaggaattaaagagataaatgaacacaaaattatgttataccaaaaagcgcatgaaacgacggatgacataatgaaaagcatagtaatgattgagtctgcgctccttcaaaaaacatgtgatcattttcagttatcacattggaagccatttatcacatacgtattaggtggaaatcgccttcaaaaagaaattcaattgtatgctgataagcaacattcgcctgtttttcaagctatgcaagatgctttaggggataaagcagaagtagtgattaatggttggatgaaggaattgagaaagaaagaaaaacaatttttagaaaatcacacagacataaatgaaataaattctgtgttaaggaataaatagaagacataagcaattttacattggaagaaggtacgagcatgcaacaatcaaaagaagaaagagtacatgacgtatttgaaaagatttctgataaatacgatgtgatgaattctgtaattagttttcaaagacataaagcgtggcgtaaagaaacgatgcgaattatggatgtacaaccaggcagtcaagcgcttgatgtatgctgtggaaccgcagattggacaattgcgctagctggagccgtaggtgaacaaggaaaggttgttggcttagacttcagtgaaaatatgttatctgtcggtaagcaaaaggtagaggcgttacaattaaaacaagtagaacttctacatgggaatgcaatggaacttccgtttgaagataatacgtttgattatgtgacgattgggtttggtttacgtaacgtaccggattatatgcacgtattaaaagaaatgacgcgtgtagtaaaaccaggtggaaaagtaatctgtttagaaacatctcaaccaacaatgattggttttcgacaagggtatattttatactttaaatatatcatgccgttatttggaaagatgtttgcgaaaagttataaagagtattcatggcttcaagaatctgctagtacgttcccagggatgaaagaattggctcaaatgtttgagcaagctggacttgaacgtgtgcaagtgaaaccatttacttttggggtagcagcgatgcatttaggtattaaaccagaatcaaaatagaaaaaagaagttttaggttaaggtgaacaatatgaagttacaacttatgtactcttttttacgatcggatattaatgtgatagaaaaagaattaaaaaagacagtcgcttctgaacagccattagtagaagaggcagcattacagcttattgaagctggtgggaaacgaattcgtcctgtatttgtgttgcttgcagggaaatttggagattataagttagatgcgattaagcatgttgctgttgcgttagaacttattcatatggcttctcttgttcacgatgatgttattgatgctgcatttttacgacgcggcagtgcgactgtgaatgcgaaatggggagatcgtattgcgatgtatacaggggactatctgttcgctaagtctcttgaatgtataacaaatatcgaaattccagaggcgcatcaagcgttatcacatactattttagaagtctgtaaaggtgaaattgaacaaattaaagataaatacaattataaccaaaatttaagaacgtatttaagaagaataaagcgaaaaacagcattattaattgccgcgagttgtcaattgggagcgattgctgctggtgctaatcgtgatacggtaaatcgtctattttggtatgggtattttgtaggaatgtcttatcaaattattgatgacattttagacttcgtttctacagaagagaaacttggaaaacctgctggcggagatttactacaagggaatattacacttcctgctctatatgcgatggaagatcccgtacttcgtcagaaaatcacatctgtacatgaaaattcaacagcaagtgaaatacaagaaattattgatgctgtaaaaaatagtacagcaattgatcaagcatttgcatttagtgaacgttatttacataaagctttagaaataataaaaccactcccacgtggaaaagcaaagtacgcattacaaaatgttgcaaagtatattggaaaacgaaaattttaatgtttattctaaaaaataaaataatctctctatttcaaaactattgcacaattgtgataagggtgataatatgtgtgtggggatatacaattacatacataattcagaagtggagagattttttatggaaaaaacatttctaatggtaaaaccagacggtgtacaacgtgccttcattggggaaattgtagctcgttttgagaaaaaaggctttcaattagttggtgcaaaattaatgcaagtcactccggaaattgctggacaacactacgctgagcataaggaaaaacctttctttggtgagttagtagactttattacatctggacctgtgttcgcaatggtatggcaaggtgaaggtgtagtagatacagcgcgtaacatgatggggaaaacaagaccacatgaagcagctcctggaacaattcgtggagatttcggtgtaactgttgcgaaaaacattatccatggttctgattctttagaaagcgcagagcgcgagattgctattttctttaaagaagaagaattagttgactactcaaaattaatgaatgaatggatttactaattattttgaaataatttgtaaacgctttaatcactgtgataatagtaaaaagtgcaaggagaataggggtattcttcttgcacttttttattttcagttagttacgaagtttgagctgttatgatatgttgatatttaaattaggcctatcggaaatatagaataagaaaatggtcgatttatgatataatttctttaatatttttagaatgataaaagttaatatagtgagataaatacatatacgaaaagaggaataacgtatgcgatatattacagctggtgaatctcatggtccacaacttacaacgattatagaaggtgttccggcaggattgtctttagtagcagatgatataaacgaagagttagctagaaggcaaaagggatatgggcgcggtagacgcatgcaaatagaaacggatcaagtgcaaattttaagtggtgttagacatggagaaacattaggttcccctattgcacttgttgttgaaaatcgtgattttgcacactggacaaaaattatgggggcggagcctttaactgagcaagaagaaaaagagatgaaaaggaaagtgacaaaaccaaggcctgggcatgctgatttaaatggtgcgattaaatatggtcatagagatatgaggaatgtactggaacgttcgtcagcgcgcgaaacgacggtgcgtgttgctgctggtgcggttgctaaaaaggtgttagcagaacttggtattaaagtggcgggccatgtaattgaaattggcggtgtacaagctaaggagattacgtatagttcaattgaagaattaaagagtattacagaagcatatcctgtacgttgcttagatgaagaagctggtaaccaaatgatgaaagcgattgatgatgcgaaagcaaatggtgattcaattggtggaattgttgaagtaattgtggaagggatgccaattggagtaggtagctacgtgcattatgatcgaaaactggatgcgaaattagcagctgcaattatgagtattaatgcttttaaaggtgtcgagattggaattggttttgaagcagcgcatagaccaggaagtgaagttcatgatgaaattctgtgggatgaggagcatggatatacacgaagaacaaataatgcaggtggactagaaggcggtatgacgactggaatgccaattgttgtgcgcggtgtgatgaaaccgatacctacactttataaacctcttcaaagtgtagatattgatacgaaagagccttttacagcgagtattgaacgttcagatagttgtgcagtgccagcagctagtgtcgttgcagaagcggttgtggcttgggaattagcgacagctttaatagaacaattcggattagatcgtatggaactaattcgtgaaaatattgagaaacataatgaatatgcgaggggattttaatgggaaacatacatattcaaacgaaatcaaaagaatatgatgtacatgttggtaaagaagcgttgtcaaacttaacaacgatcgttcaaaatatgcagccagcggtatctaacgtaatgatcatttcagatgaagctgttgcatcactacatttacagacagttatcgatgcattacaagtagagcagcacgtgttttcgtttgttgtaccaagtggcgaaaaagagaagtctttcgaaaatttctatgcggctcatacgtcagctcttgaaaataaattagatagaaattctttaattcttgcacttggaggcggaatgattggagatttagctggttttgttgctgcatcgtttatgcgtggtattcgctttgtgcaggttccgacaactttattagcgcacgatagcgctgtgggtgggaaagtagcgattaaccatccgttaggtaaaaatatgattggtgcattccatcagccagaagcagttgtatatcatacaccgtttttacagtctcttcctgaaaaagagtggcgttcaggttatgcagaggtgataaagcatgctcttatcggtgatgtggagctataccattggttaaaagaagaagtgcaaacattagcggatcttcatgatgagaagttaatccatatattaacgaaggcgattcctgtaaaggcaaatgttgtgtcacaagatgaaacagagaagggtgtacgtgctcatttgaactttggacatacgttaggacatgctcttgaaaaagagctagggtatggaaatattactcacggtgacggtgtagcggttggaatgttattcgccatatttttaagtgagcaagtgtacaaggttgatcttgcttatgaagatatgaagcagtggttcttgaaatacggctatccaaaaatgccaagggatttgaatgtagagcgcctcgttcaattgatgaaacaagataagaaagcaaatgcaggagcaattcatatggtgcttatgcaggaatatggggtagtgaatgtcgtatctatttcagatgagactgttcatattgcgttagaggcatttcaaaaagatatgatttaaaatgatagcgaagtgctgtgaagtgctcatttagaggtattctcgtaatagtgacggttatgacaaaagattacagtaaggggctataacccatgcccatcaacttaaggatagaaactctacggttttccattaattgaaatggattttgtacatgcttaaacaagcgaaaatgtacatgtttatcttgacatttacaccaagaggtaatgtattcttgagcaataattgctttacgatgaaaataagccgttttattcggcgaaatattttcaacagcacctatgagcgattgatgccaaatactagcatctttattcggtgcatgagaaagaaagtattgcatgatttgaatgcctttaaggggaataggtttatagacataggaaccagagcgcttgaaattttcagggatgttaccgccattaaaaaattcaacagcctttatataaggaacttcttctataaagagagaggggctaccagtttcaagaagaggtgaagaatgagatttacctttgtgagaaataaataaagcataagaataaagaatctacatagagttcaatgaaaacagttgcaaactgttcatattttgttatgatagtgttacgaaaacgtttgcataaaaattccgatgggatgcaaaaggagagaatgactatgaataagacatggtggaaagaagcggttgcttatcaaatttatccacgaagctttatggattcaaatggtgatggtattggagatttacaaggtattattgcaaaactggattatttaaaagatttaggtatagatgtaatttggatttgtccaatgtataagtcgcctaatgatgataatggttatgatattagtgattatcaagatattatggatgagtttggtacaatggcagactttgatgctttactagatgaagttcataagcgtgatatgaagcttattattgatttagttattaatcatacgagtgatgaacatccatggtttattgaatcacgttcatctaaagataatccgaagcgtgattggtatatttggcatgatggtaaagatggtgcggagccaaacaactgggaaagtatttttaatggttcggcatgggaatatgatgaagaaacagaacaatattatttacatctattctcacgtaaacaaccagatttaaactgggagaataaagaagttcgcgaagtactatatgatacggttaattggtggcttgataaaggtattgatggtttccgcgttgatgcgatcagtcatattaaaaaagaagaaggcctcaaggatatgccaaatccaaaagagttaaaatatgtgccatcttttgataaacatatgaatgtgaaaggtattcaacctttattagaagagctaaaagaaaatacattctctaagtacgatattatgactgttggtgaagcaaatggtgttaagattgaagatgctgagctttgggttggagaagagcaaggtaagttcaatatggtattccagtttgaacatttaagtttatgggatgcagagaagaagaaagaccttgatgttgtaggattgaaaaaagtattaacgaaatggcaaaaaggattggaaaataaaggatggaacgctttatatattgagaatcatgataaaccacgtatcgtttcaacatggggagatgacaaacaatattggcgtgaaagtgcaacagctctaggagcgatgtatttctttatgcacggtacaccgtttatttatcaaggacaagaaattggtatgacaaatgttcagttgccaaatattgaagattacgatgatgtagcaattaaaaatttatatcgcgagaaaattgcagagggcgtaccacatcaagatatgatggagattatatgggcttcttgccgcgataattcccgtacacctatgcagtggaatgatgagatgaatgctggtttcacaacgagtacaccttggtttagcatgaatccaaattacaaagaaattaatgttgagaagcaaaaaaatgaagaaaagtctattttcaatttctataagaaaatgattgctctgaaaaaagagcacgatgtactgaactatggtacgtacgatttacttttagaagaagatccacaaatttatgcatatacacgtacgttacaggatgaaaaagtcattgtaattagtaatatctcaaaagaggaagctgtgtataatgagggttcatttgcactaaaacgcaaacgtttgcttttaaataactatgaagttgcggaacatgaagaagtaacaacaattgctttaaaaccttatgaaacaagggtttatcgcatttcataataaaaaaggatgctctttgagcatctttttttatgaaaaaaataaatttctattgcaaagtgaaaacgcttttattaaaatagatttatgaaaacggttgcgcaaagataaaaataaagtaatataaggaatcgttttcataaagggaacagaaattataatttaaatcattatgttgttataaataaaggggaggaagaacagatgaaaattacgtcttttgatttttggcaaaagttcgggaaagctttattagttgttgtagctgtaatgccagcagctggtttaatgatttccatcggtaagttaattggtatgtctgctggggatgttaacgcagttcatacaatcgctcgcgtaatggaagacatcggttgggcaatcattacaaatctacacatcttattcgcagtagcaattgggggatcttgggcgaaagatcgcgcgggtggtgcatttgcagcgctattagcattcgtcttaacaaaccgaattacaggagctatatttggggtaaacgctgaaatgttagcggattcaaaagcgaaagtttcttcagtaatagcgggagatttaattgtaaaagattactttacttctgtacttggtgcacccgcattaaacatgggagtgttcgtagggattatcacaggtttcttaggagctactttatataacaaatattataactataataaactgccacaggcattagcattctttaatggaaaacgatttgtaccattcgttgtaattctttggtctacagttactgcgattgtattatcacttctatggccattcatccaaagtgggttaaatgaatttggtcgctggattgcagcttcaaaagatagtgcaccagttgttgcaccgtttgtatatggaacgttagagcgtttattattaccatttggtttacaccatatgttaacgattccgatgaactatacagagctaggcggaacatatacgatgctaactggttcaaaagttggacaagttgtagcaggacaagatccattatggcttgcatggattacagatttaaataatttactagcaaatggagatacgaaggcatataacgatttattaaataacgttgtaccagctcgtttcaaagctggacaagttatcggctcaacagcagcgttaatggggattgcatttgcgatgttccgtaacgttgataaagaaaagcgtgcaaaatataaaccaatgtttttatcagcagcattagcagtattcttaacaggtgtaacagaaccaattgaattcatgttcatgtttattgctccagtattatatgttgtatatgctattacaacaggacttgcattcgcgctagctgatttaattaacttacgtgttcatgcatttggatttattgagttaattactcgtacaccaatgatggttaacgcaggtttaacaagagacttaatcaactttgttattgtttcattagtgttcttcggtcttaactttacactatttaatttcttaattaaaaaattcaatttaccaacaccagggcgtgcaggtaactatattgataatgaagatgaggcatcagaaggaacaggaaatgtaaaagacggttcactagcaacaaaagttatcgatttattaggtggaaaagaaaatattgctgacgtagatgcttgtatgacgcgcttacgtgtaacagtaaaagatttagatgttgttgcaccagaagcacagtggaaacaaaatggtgctctagggcttattgtaaaagataaaggtgtacaagcggtatatggtccgaaagctgacgtattaaagtcagacattcaagatatgttaggtgcgtaataatatgaaattgctaactttaaactgtcattcttggcaagaagagaatcaaatagaaaagatacaataccttgctaaagtaattcaagaagaagagtacgatgtcatcgcattgcaagaagtaagtcagtccatacaagctgaaaatgtatgcggtaacaagaaagaagataattttggacttttactattagaagagttaaaagcgctacatgtaaaagattacaatattacttgggatttctctcatattggttatgacgtgtatgaagaaggattagcgattataacgaagcataatattataaaagaagatacgttcttcatttcagaaaacgaggatacaacgtattggaaaacacgtaaaattgtaagtacaacaattgcttataatggtaaggatataacgttttactcttgccatctcggttggtggaatgatgaagaagagtcattcaaaggtcaagttgatcgtttgatggagcgtgtagatagcaataagctcgccttcttaatgggggattttaataacaatgctcggttggaaggcgaaggttatgagtatatgatgcaaaaagggttgtatgacacatatgaattagcaatagagaaggatgaaggaacgactgtccaaggtgagattgctggttgggatgaaaataaacataatttgcgaatcgatctaatattgtgtaaccaaagtaaaaaagttcattcttcaaaagttatttttaatggtacaaacagaaatgtaatttcagatcatttcggtgtagaggttcaattggatatataatagaagaaatcctcacagagaataaaagctgtgaggattttttttaggaatacaagtatttccaagagaaaatacttgtattttttatgacatttcatatatatttgttattattgaatgtaaaaccgatttggtcattttgtattcatactttgactcacttcgttatataatgaagtaagtgaaagttaatgggaaaaaatagtacgtttttggttaatacacgatgtagaaagtgatataattgcaaaatgcatgtatcattttctaaagaaggaaaaatatataattaggtgataacttctatgaaacaaatttggcgtatttataagacagatttacggaatgtagccaaacattgggctgcaattgttattgttttaggattaatgattttaccatcgttatatgcatggtttaacattaaagcttcttgggatccatatggaaatacaaaagaggttcccattgcagtttccaaccaagatgcaggttctaatttaagagggaaagatattaatatcgggaaagagattgtagactcccttaagaaaaacaaaaatcttggctggaaatttgtagatgaaaaacaagcaatttacggagttgagcgtggggattattatgcaagtattacgattccaaaagacttctctgaaaaaattgcaactgttctggatgaaaatccgaaaaaaccagaactggattactatgtgaatgaaaaagtaaacgcgattgcaccgaagattacagcaaaaggtgcatcaggtattacagaagaaattagtaaaaactttgtaaaaacagcaaacggtgagatttttaaaattttcaatgaccttggaatcgatttagaaacaaacttaccaagtatcgaaaaagtaaaagatcttgtatttaagttagaagcgcagttcccagaaatgaatacacttatggataaggcgttagatgatgcaactcgagcagaagatgttgtgaaagtagcgcaaaaagagttgccggttgtagagagtgttatgaatgatgggcaagaggcgttagggaatttagataaattctttgcgagaaatgatgaaacattgaatcgcgctccgggaactattaaaaataatttaacagtaatgcagcagggattggatgctgcagcgaaaattacggattacttaaaaaatccggcatttgactttaatctgacattgccagatccagctaaattaccagtcttacctaatataactattccacaaataccagagattccagcattaccacaagtgaatggtgaagggtataaaaatattgctaaaaatattgatcaaactgtaaacactgttttcaattctactcgtgttggaacggcatatgtaaagagtgttatggatggccttcaaaataaaggcgtggatccagctgtagcacagaaaaatgtgcaggatgcttcaaagctcctccaagagcgtatcgatagtgtttcatatttgattgatttctttacagctttcaaggaatcagcttccacggaattcggtaaacagttctttggaaacagagtggaaagtttaacggtgcttaaaaattctatggtggacgctaacaatagggttaagcatgtaggagatttaattagttccggacaagaagttaaacaagatgtgcgagatgctgtaaatcaaaaattagatgcagtaaataatttagtaaatcaagctgaaaaggattataatgcaacgtttgtagctgattttgaaaaagcagtaagtacagctgagcaactgaaaagtaaggctgaaaatgcgcaagaaaatgcacagcagcttagaggcaatttaaatcaagatataaataaggctaatgagatattaaacaatggtagagagaaatatgataaagctgtaaatgattacagtagattaaaaacggagcttgaaaaagcaagagaagacttaagtaacaaaggtgttaacggattagattctacaaaagtagccttaaatgatttgaatgggcagttcaaagcaagttggaatttagttaatgacatgattccagttctggaaagtacaaataaagtgttagctgatgtgaatagtgataaaaatcttaatggtacaatttctaagttaaataaagcaaaagatggtttgcaaaaaggaatggatttaactgataaaggaattgacgctattaataaaggtcaaaaaccagcagctgatgttattgaaagtattaatcaagtgtctaaaagtgtttcgggccaaattggtgacattttagctaaatatgactcagaaatcactccaaatttcaatgcagcaattgctcgcacaaaagagatgtctaaaaatacatctcaaattttaaaagaggcagacaaaaagcttccagatgttaaaaaattactagaagattcatcaaaaggtttagtagatggtaaaaagaaattagcagacattaaagctgaaatgccagctactgagaaaaagattaaagaattagcagataaaattcgtgattttgaatctgaagaggatttaaaagacatcatacgcttattgaaaaacgatgttgagaagcaaagtgattactttgcgaatccagtaaatttaaaagaaaataaattatttgcgatgccgaactacggttcagcgatgtcaccattctatacagtgcttgcattatgggtaggcgcattattaatggtttcattattaacggtagaagtacacgaagagggcgcgaattataagagccatgaaatttacttcggacgtttattaacattcttaacgataggtctttcacaagcgtttatcgtatcgatgggagatatattcttactcggtacgtacgtagtcgataagttctggtttgtgttatttagtttatttattggtggagtcttcgtttgtatcgtatactcactcgtttctattttcggaaacgttgggaaatcgatggcgattattttacttgtactacaagtagcaggatcgggcggaacattcccaatccaaatgacaccagcgttcttccaagcgatttatccgttcttaccattcacatacgcaattagcgcaattcgtgaaacagttggtggaatgctttgggatatcgtaacgcgagatttacttgtgttaagtgctttcgtagtagttatgattgttgctgcgttattactgaaaacaccaattaacaaatcaagtgaaaaatttgttgagaatgcaaaaggaagtaaaatcattcactaaaataaaaggttcctaccgatagaggtaggaacctttttgtttaatcaaattttaatttttttaatgcttccgcgaatgggttatttaatggttcttcttcttttttctgttgtttcatatatttttgaacgtcgcgtttatcggctttgtttccagattcttttttacgtcgctcttggaatgttgataatttctcgcgatagccacatttacatgcgaaaatttggcctgcaccctcaccacgtaattctagtttctttttacattgcggacagcgagcatttgttgtacgagatacatttttacgatgaccacattcacggtcttggcatacgagcattttccccttttttccatttacttctagcattggtttaccgcaatctggacaagacttcgttgaaatgttgtcatgtttatatttcttatcactcgatttaatttcagcaacaatttctttcgtatagttcttcatttccgaaatgaatacttctttctttaattttccttttgcaattgcttcaagtttttgttcccactcaccagttagtgtaggtgattttaattcttctggtactaaatcaagtaattgacgaccttttgatgtaatgtgaatatctttaccacgtttttcaattaagaaagaattgaaaagtttgtcgataatatctgcacgtgtcgctacagtacctaatccaccagtcgattttaacgtatcagcaagttgtttattttgcgtatccatatattttgtaggattctccattgctgaaagtaaagttgcttcattaaagcgtgcaggtgctttcgtttgacctgatgtttgcataagtaactttacagttaatgtatcgcccttttcaatgtgaggtagaatctgctcttttacgtcatcagttacatcatcgtcttcaaatcgattttcgtatacttccttccaaccagcatgtaaaatcgtttttccgcgtgcaatgaatgtttcattgccgacctttgtgcgtaacgttagttgttcgtattcgaatgctgggaataaaacagctaagaaacgttttacaactaaatcataaattttgcgttctttatctgtgaatgctgcgaagttaacgtatccttctgttggaataatcgcatgatgatcgcttactttactatcatcaacaaatgatttgttaggtttgataggcttttgtaatactttatgtgcgaagggacggtattctccaacaccacatgcttttagacgttctggaagtgttccaacgatatcagatgaaatgtagcgtgaatctgtacgagggtacgttagtactttatgctgttcatacaatttttgcataatatttaatgtttctttagcagagtaaccgaactttttatttgcatcacgttgcaattcagttaaatcgtaaagaccaggagagaatgacttcttctgtttcttatcaatttccacaacagtagcattttgtttatctaaactttttacaataccatcgattttttctttattaaaactacggctattgccatttgcatcttgccaagtaagtttgagcttctccattgtttgagcttcgatgccgtagtaagtttgagctttgaagttctttatttcatcctcacgactagcaatcatagcaacagtaggggtttgtacacggccgcaatttaactgggcattaaagcgagtcgttaaagcacgagttgcattaagaccgatataccagtcagcttctgaacgtgcaactgctgaagcgtataaattgtcataggctttacctggttttaaatttgcaaaaccatctttaattgctttatcggttacagaagaaatccataaacgtttgattggtttatttagcttaactttatcgataatccagcgtgcgactaattccccttcacgtccagcgtctgttgctacaataatttcatttacatcttttctaagtagctgactttttacagcattaaattgtttaccagtttgtttaataaccgttaatttcaaacgctcaggtagcatcggtaaatcttctaaattccactttttatatttcacatcataactttctggatctgctaatgtaacgagatgacctaaagcccaagttacaatatatttactaccctcaagatagccgtttccttttttatcacacttcagtacacgagcaatatctcgtgcaacggaaggtttttcagcgattacaacgctttttgacatattaaaaacatcctttcaaatttccataagttaaatatagcatacatcttcttgagattcagtttcgctccatatttgatcggtttttagtgggatgaacaaaacactcactgattaaagtttcacttgattatgtttattgttatataggttgcttctatattaaatagaaaagtaaagaacttgttattttactagaataagagtagactttgaagtagatgaataataagcacatgggagtttgtggatacaaactgagagtatgactactagtccgtcattgaccatttgaacctgttggataatgccagcgtagggagagtgtaaaagcacatgttcaggcactttgcgtacgcgcaaagtgtctttttgtgtatctcccatcattatagttaggagatgaaaaggatgaatatgaaagaaattagtaaagtagtggatttggtgagagaatctaatccgctcgttcataatattacaaatgttgttgtaacaaattttactgctaacggtttgttggcacttggggcatcgcctgtaatggcgtatgcaaaagaagaagtagcagaaatggctagcattgctggagcgttagtattaaatatggggacacttcgtcctgaagaagtagaagcgatgttacttgcgggtaaatcagcaaatgcgaacaatgtgccagtactatttgatccagttggtgcaggagcaacttcatatcgaacagaagttgcgagacatattccggctgaaatcgatttagcaattatccgcggaaatgcagctgaaatagcaaatgttattaatgagaaatgggaaattaaaggggtagacgctggtactggaaatggcaatattgtaagtattgcaaggcaggcagcagatgaactaaatacagttgcggtcattactggaaaagaagatgttgttacagatggagagagaactattgttattcgaaatggtcaccctattttaacgaaagttacgggaacaggttgtttactaacttctgtaataggagcatttgtagcagtggaaaaagattatgttaaagcagcagtagccgcattaacgttttatggtgtagcttcggaactggcagctgctaaggcggtagaaaaagggcctggtagtttccaaattgaatttttaaatcaattagcgaatacaacttcaggtgatattgagaagtatgggaagattgtggagttagagtaagagggagtgaaagaaatggcacgcattgaaatagataaaatgtctaagctattgcaagtgtattttattatgggaagtaataactgcacgagggatcctttagctgtattgaaagaagcgttagatggtggagtgacactttttcagtttcgcgagaagggggaaggttctttaatcggagaagatagagtgcgctttgcaaaagaattgcagacgctttgtaaggaatatagtgttcctttcattgtaaatgatgatgtagaattagccattgaattagatgcagatggtgttcatgttggacaagatgatgaaggaattacatctgttcgtgaaaaaatgggagataaaattatcggcgtatctgctcatacaattgaagaagcacgttttgcaatcgaaaatggagcggattatttaggtgttggtcctattttcccaacgagtacgaaaaaagatacgaaagcggttcaaggaacgaaaggattagcttattttagagaacaaggaattacagtgccaatcgttggtattggtgggattacaattgaaaatacagcggcagttatagaggcgggtgcggacggtgtttcagttatttcagcaattagtttagcggaatctgcgtatgaaagtacgagaaaattagttgaagaagtaaagagaagtttgtagggaaggaagtgtagtattttaagtgctacatgaagaaatagactgcccaaaatttaaacaaatatttgattaaaaaagcacaaacctttttaaataaaggtttgtgctttttctttaaaacataattgaaattaagagcattccaatgccgatagaagtaaatgttgcaattaggcccggaatcataaaactatgatttaatacgtatttaccgatacctgttgtaccagtacggtcaaagttaatggcagcaacgattgttccatagtttggaatgaagaaatatccatttactgcagggaacatcgcaatcagtagcgctggtggaataccaagagatagtccaagtggcattaaggcacgaactgttgctgcttggctgtacagtaaaatagatagaatgaatagtgcgatagcaaatagccaaggtgcacttgttactaaatgctgaatcgatccttgaatcatatttaagtttccattaaagaaagtatctcccatccaagcgataccgaaaatagcaacaactgctgttgctcctgctttaaagacgttaccagatacaatgctttctacatttggtttacagaaaataataataagagccgcgatagttaacataaccatctcaattgtgttcggcatggaaagacgggctaacttcccatcaactatccatcctggacgaagtgcttcaaatgaaccaagaagtacaacaaggaaggttcctacaaggaaaaggataactgataattttgcgccctttacacctacaaattcttttttctcttcaagcttaggaattaatccttcttttaatcgttttaagtattcagggtcttcatttaattcttttcccatcttactagcaacaaatgcagctatcatacaagcgatgaaagtagaagggatacttacttttaaaatatctaataaggtgattttatagtcagctaacattgctaaaagtgcaactgttgcagctgatataggactagctgtaattgcttgttgggaagcaattacggcaattgacattggtcgttctggtctaattccggattcgcgagagacttcagcgataacaggaagtacagaataagcaacgtgaccagttcctgcacaaagtgtaaataaataagtaacaattggagcaaagaatgtaatgcgttttggattttttcgtaatgccttttcagctagatgaacaaggtagtccattcctccagcggcttgcaaagcaccagcagctgtaattactgccaaaatcataagcattacatcgataggaggcgccgttggttgtaagtggaagacaaaaacgagtattgccataccaactccacccattactcctaaaccaactccgcctaggcgtgcaccaataaaaatacagagtaacaaggtaagaaattgtagccaaaacatgataaactacctccgaaattcattagttaagatatattcgaatagtttaatttgaatgaaaattaaataaatacccgaagaaatccttgttatttatacattttttattatataacataaaaaaagtaacattcacgtactttttgaaattattttgaaaaagcaattcattaaaaatttgtatttatatctctaaataagtagacattttgatttatatgttgtaatctttgaaagagaataaattaattctcatagaactcccatatcgttcaactcgttcagcgagaaaggcaaactgatggaaacatgaggacgcaaaactacaggagctaaggtcgaaaggctacgctagccagttaccggacggatagggttggtcttggccaatgcttttacattggcttttttttattctcgaacatattgagaaacattttcaaacaaaatattcatatattttgttttttttgtttatgttgattaaggaaggtggatattaatgaaaaaatattggcataagttatcgttccttcaaaagaacgtcttattaaccgtattagttattttgacacttgttggaagtatgggtgcattaagttttaacatgtttcaaaatagtatgatgtctttatttgaaaggcagtctattgaaacaggagaaatagtattgaaaaaactggatgtagaattagttagagacatggcgaaagatcctacagccgaaaaagtgaaaaaagaaaagttaacagagaaattagatgaagtatcaaaagaattgaaaagcgttggacaaacgtatgttacaggagcaaagccgaatgaaaagcgagaattacaactcgttggtttgactacagagttaacaaatgcgtttcctataaagccgggagattattatgaacaacccgctcattggatgaaggcatacgataaagtgattgatacgaaaaaggctcaaatgacagaagtatatgaagatgaaataggttcgtgggtgacaatattagaaccaattacagatggagaaaacaatattgttgcaattattgcggctgacttagatgcttccattgttcctattacaaaagagaagtttatgatacagggcttactcttcatcattatttcattagcaattgcgactattactcaattctttatcgtgcgtcactcgctagctccattaaaagatttacgagaagggttacgtaaaattggtgaaggtgacttaagtattaaattaaaagaaagaccagatgatattggaattattaatgtttatttcaataacacaattgaaaaatttaaagggattatagataaagtaaggcaaactgctgagcaagtttcttcttcttcacaagaattgtcggcgagtacagaggaaaacagcatggcagttcaagagattgcaagttctattgaaggtttaagagtaggggcacagtctcaaaaaacttcagtacaacaatgtttaggaattgtacatggaatggaagataaggtagaagaaataactggggctgcaaaacaagttgcggttgcttctgaaggtatggaacaacattcaattgaaggtaatgaagtgattggacaaattattaatcaaatgagtttaatccaaaatgcagtacaagatttatcttccatcatttattcgttagaaacaaggtcaaaagaaattagtgatatcgtaactgtaattacaggtatttcaaatcaaacaaatctattagctttaaatgcttctattgaggcttcacgtgctggagcagctggaagagggtttgcagttgttgctgatgaagtacgaaaattagcagaacaaacggaagcgtctgcaaaagatatagcgaaattaattggtgaaacacaagctgagacagaagatgctgtagtttccatgcaaaaaggttcaaaagaagtagaaactggaatttcgcttgttcaaagtagtggagatttctttgaaaaaatctcaaaatcagcgcaatctgttacagatcaagtaaaagctgtttccggtaattcgagtgacattttacaaaatagccagaatattgttcaagtcgtaaatgaattatcacatattgcaaatacttatgccaacagcagtagtaatgttgaagaaagcatgaaagagcaagaaatatcagtacaagatattgcagaattagcgacttctttaagttggctttctcaggaattgcaagagcttattggtgagtttaaaagcgaataaggagaaagttcaattctaatcaaggggggtatctccgctactgattatgaattgaacgaatctgccctttaataagggatgaaaaaggtgtgaattttcacacctttattatatttaagagaggaatttacataaatatgaaattagtgatttcttataatgagatgataaaagaatttttaggaaaagtagaaggaagtattaaaatacctaaagatgtgcacggaacagaacttaggataaaaaggaaaacggaactgttttcaaatttgactcacattgtagatttaataggagcgactgcaacgtggttatatcatatttctaaagaaaaacatattgtcatgctttatcatgtaagaggaaatttatttccaattactattgaagtttctaattttctctcctatgaaagtttaaatttacaaattgaagagcaactggagcaaattaaagaaatgaatgaggaagaaatagaagagtttcaaaacggtaatacattatatgaaatgtcacctattattattggtgaaacatattatgagctacaagacacgaatacattacaatttgtatttagtaaaaatatgcaaagtgtagaaataatatttaatagtgttaattggaaagagacaacgattactcgttatgcacaacaaatacaaggtgttttagttgatatatcacaaaatactaataagtatataaaacattttaatattattacagaggccgagatggcactttatagtcaagtgaatgatacgacagcagtatatcctgagaaaagtatcgtcgatatgttctataatactgttactcaatttccaaatcgtatagctttatcttcaagggaaggtactttaacttatgaggagctaaataaaaaaagtaatcaaatagctcatatgttaattaaaaacggcgtccaattaggagactatgttggaatatttatgaaacgtagcatagacacagtagtaagtatggtagctatattaaaagctggtgcagcgtatgttccgattgatccagattatccggaaagtagaatacagtacattattcaagatagccaagcgaaagttatattgatgaaagagacgcctataacatgtgatggggttcaaacagtttcattgtatgatagtgaaacttatgaagatatagatgtaaagttgtctattcattgtgatgatgtagcttatatgatttatacatcgggttcaacagggaatccaaagggaacgatgttagcacatagaggcgttgttaatctgtacacttggatgaaaaagcaatatgaattgacagaagaggatgtatttgctcaatttccttcctttagtttcgatgcttctgtatgggagtcatttgcttctttattctgcggaggaaacttgtatgtactattagaggaagagcgattgtctgtagaggcatttgcaaatgcaatctataaagtgaaagcaacttcaatcttggcattagcaacaatttttgttcgacaagtagcaacttatttagcagaagaagatatatataagctagcttccctaaaaagaattgcgattggtggtgaaatgttgcctgtagaggttattaaattgtggagagaaagaataggtacaaatgttgaaatttataatgtatacggaccgacagaatgtactgtagtgacgacaacctataaaatacctagtcagttaaatgaggatgttgcgagtattcccattggtaaaccatgtgctaattatcaagttatgattttggatgagaatatgaatctttgtccaattggtgtacctggtgaattatatatagattcagtgggattagcaaaagggtattttaataagcctaataaaacaattgaagcttttattccgaacccttttaatcctatagttaatatatataaaacaggtgatatcgttaagttgctagaggatggaaatatagagtttttacatcggaaagatgatcaagtaaaaattagaggacatcgtattgaactaggagaaatccaaagtaaaatttctcaaaatcataatataaaagaaaatgctgtttttgctaagaagagtaaggaaggtagccaatatttaatcgcgttctatacaactttaaataaaaaagaaataccagaattagtttatcagttacaagagcaattaccagattatatggtgccatctaaactaatttatattaatgaattaccacttacacctaataaaaagattgatgttaagaagttagctcagttagaagaaaagtatgaaccggttcggctacaagaatatgttgcaccttctaataaagcagaaaaacaaatcgcgaacgcctgggcggaagtattaggaatttcaaaagttggagtgcatgatgatttctttacaattggtggacattcattaaaagtattacgagtcttaacattgttaaaagaagatttctcacatttaacaattcaagatttctttaaagaaagaacgatatatggattagctcgaattgagcgagaagtaaaagtagagaaagaagaagtatttcgtgaatataaagtgattcacgagccagatactatcacgtatgcaaacgttttggaagaaatccagatttcaaatgtctttttaacaggagctactggttatttaggatcacacatattatatgaattgttgagagatacatctgctactatttattgtttagtaagaccaaccaaagatgtgcagcaaagaattatagatacattaacaggctactttaatgatatatgtgaagaatggttacagcgtatacaggccgtagctggtgatctgggagaagagtatcttgggatgagcgaagaagaatttatgttcatcagttctaagatggatacgataattcattgcggtgcagatgtaagacattttggagatgtaaaacaatttgaaaatataaatgtccaaggaactagccgtatgctagcattagcggagaaaggtgctacattccattttatttctacaattggtatcccgttagaattagcggtagatcaatgggatacatacatgaaaactggtgattttaattacagtgtagacttagagaatgtatattcaaatagtaaactacaagcggaaaacattgttcgtgaagcaatgaaaaatggtttgcgcggaaatatttatcgtgcaggtaatttagcatgtcattcagaaacaggttcgttccaacaaaatattgaaggaaacgcattttatcgtcttattaaaacaatgctattaattgggaaagcaccaaatgtgaagtggaaagttgatttcacaccaattgattttgctagtaaatcaattgtatcgtatttacaagatgcgcaaattgtaggagagacgttacatatttgtcatccacatcaaattgagtttgaacaatttatacagctaattggagagtgtggatacaatcttgaaatggttccactttcagaatatgtaaataccggacttgcattagcgaagggaaatgaagtaatagcagagttaattgcttctcaagttgcaggagatggagcacagcaatctgaaattgtaatgggtacgcgtagaacgaatgaatggattaagaaaaaagaattgatagtaccagcaattaataaagaatttatacagcagttattagctcatggtgaaaaagttggttattttccaaaaataatgaaatgattatgcatgcttttgtttgttcaataaaataaatcatgctacaatgaaaacgaattaaggaccggggagccaattggctgagaggatgtaagtaaacatcgaccctcaacctgatctggataatgccagcgtagggagttacttaaagtgatgtagcatatgttattctgtaataacttgcatacaaggctttcctacgcagtaggaaagccttttcttatttttgaaatttaattttataagggggattttattatgtcacaacaagttacaatgtcattttcagtagtaccacaagcgaaaacgaaagatgtatattctgttgtcgataaagcaattgaagttgtgcaacaatcgggagttcgttatgaagtaggggcaatggaaacaactttggaaggagaattagatgtacttcttgatgtcgttaaacgtgcgcaacaagcttgcgtcgatgctggagcagaagaagtgattacttctattaaaatccattatcgtccaagcactggtgtaacgatagatgaaaaggtttggaagtaccgtgatgaatatgcaaaaccagaagcaatctaaacttattacaactatttggcttatccttctcattgcgatatgggaaggatctgtttcattatttaaaatcgaaccgtggattttaccaaagccttctgccaatgttcaagaattaattgggatgaaagatttactattaccaaatacgatgcaaacactgcaggaagttataattggactattctttgcaattttattggggacgagtatcgcaattattatggacgttataccgttatttcgtattttaataaatccattgctcgttatttcgcaaacaattccaattgttgtacttgcaccgctatttattatttggtttggatatgggatgttgccgaaagtaatggtcgtaatactcgtttgtttcttcccaattgcgcttagtattttagaaggttttcaaacagtagataaaaatatgctgaaactgttacaaacaatgaaggcgacgaaatggcaagtttaccagaaagtaaaatttccagcagtgctcccatactttttctcaggtttaaaaattgcagttacatatagcgtaatgggagcaattatcggagaatggctcggtgcaagtgaaggattaggcgttatgcttacgagggctacaaaatcctttttgactgcccgagtatttggtgttgcagcaatcatcgttatggtgacattatgcctgtattttatcgtagagtttatggcaagaataacagcaccatggatatatagaaaggacggcagaaaatgaaaaaaggtttgaaagttatgttagctgccttagtagcggtaggtgtggctggatgtaatccggcgaagaaagaagaaagtgcaagtaaagatcaaaaagtaaaagtagtattagattggtttccaaatacgaatcatactggcttgtatgtagcgaaaacgaaagattattacaaaaagcaaggattagatgtagaaattattcaaccaggtgacaatgtaacagcagagcaaatgatagcatcaggaaaagcagacttcgcaataagcgcacaagaaaatgtaacgttagctcgtgtagaaggaattcctgttgtatctgtaggagcgattattcagcataacacttcagcgtttgcatcgcttaagaaagacaatatgacgtcaccgaaagattttgaaggtaaacgttacggcggctggggaggaccagcagaagaagcgacattaaagacgattatggataaacatcaagctgattttaataaagttgaaaaaatcatcttaggacaaacagatttctttaaatcaattggccgtgatgcagatttcgaatggatttattacggttgggatggtattgaagcgaagcgtcaaggaaaagagttaaatacgattatggtgaaggacttagatccagcgcttgatttctatagtcctgttattattacgagtgaaaaacatacgaagcaagataaagactttgtgaaaaagtttatgagtgcaacgacagaaggttataattttgcaattaaggaaccgaaagaggctgctgatattttaattaaagctgttccagatgtgaataaagatttagttcaagaaagccaaaaatggttaagtacgaagtatcaagatgatgctaaagcatggggagtacagaaggaagaaatttggacgaattacatgaatttcttatatgacaacaaagttattaagaagaaaatcgatgtaaaagatgcttttacaaatgaattccttccaagtgaaaaatgagcggattacaaataaaaaatatagtgaaatctttcgacggaaaaaatgtattagagaatattagtgcctctatacaagagggagagtttgtttcctttgtaggaccgagtggttgcgggaaaagcacattattaaacatgattgcaaatgttgaaaaaccaacaaacgggaacgtaacgtataacgataagcaagtacaagaacaagatgttgttagttatatgccacaacaagatttattgctaccgtggcgatcagctttgcaaaatatcgttcttccattggaaatcgaagggaaaccgaaaaaacaaaggctaacagagggaatggaagcattaaagcagttcgaactagatgaatatgcagaccattatccagatgaattgtctggtggtatgcgtcaaagaattagttttctgcgcacatatttatgtgaaaagccaattatgctacttgatgagccttttggtaaattagatgcatttacaaaaatggaagtacatagctggcttttaaactcttggcatcaagagaagcaaacaatcgttatggttacacatgacctagatgaggcaatcttgctttcagatcgcgtatttattttatctcaaagaccagcttcaatagttggcgaggtacaagtgaaattacctaggccgagaacgatggatatgttaacatcactcgaattaaaaaaggataaagaagagattttaagtgtgttagctccttatatgaaaaaatagaaaaagctgatgttttaattttagacgaacggactaatcatttggatgtagaaactaagatggctttataggaagcattacaacaatacaaaggaacggttttaattgtctcacatgagccttctttctatgaatcgtggataacaaaagtatggaatatagaagattggaatgctgaacaatatgaataaagaaaaggcattagcttttatgagctaatgccttttctttgtgattaacatgattttcgagaactcttacatgagaattgtatgaagaagcactcttatggtgcgcttataagcgtgctttttcttttgttatatttataataatacgaaagcctttccctaacaggtgactatctttctttatatatatagatagttcaaaatggaatgaaaataattcctttatgtaaaggataatatggatattataggaagacaatagaaattaaaggaaatccatgtaaaattcaaatgaacttcatataaacttcatattagaaactaaatataattataacaagttattgagatgtttttgatttttcataaaattaaaagtttgaatttaggaggtattgctcaaacctaaattcaaacttcagtgaagtaattaatggatattacgtctagttttcgctaatgacggcatttaaaagttcggcaggattacctgttcctgcaccgccaattgtaatagatccaccaggaggaatttcaccattccatcctgcgttcgtaattacataatgattatttgttttactactaattttagaatcccaaacttgtgttaaattgccgctataatcaaattctaatttccaatttttaatagggttcgttccattatttttgattataatcgagaagttataaccgctgccccaattcgaagtgactgaaaatgtagcagtaccatttccatcaggaggtgtcgtattagcttcatccgttttgacagtaagagcggtaggttgtgatttatttccagcagcatctttggcaattattgaaaatttgtattccgtattaggttttaagtttttaattgtaatgctatttgttgttgtactccatttctcttctccagcagtaatttcatattccgtaactcctacgttatcagtagatgcagtccagtttaattgaactgagtttgaatttttattcgtaactacaatgtttttaacattcgttggtggctcagtatctttttgattaataggtccaccaagtaattcttttactagcgtatcaagtaattttggaccactgcaactatattttggacttgtacggcaatctccgcttagttcccaaaacattgctccacttaaacctttcgtctttatatagtctgttttgtatttcatagattcattgtcatcgtagctaataaatgtgcctgtagttgcattatataagtaaggtactttagctgtgtcattccagtagcgtacaaaaccatttttattaacgtaattggctgctaaatcaccgtaatcatagacacctgtgtcaccggtagagtaatcatcccaagtacctttagaagcaagtttcccatcactacctggtttgcaaggttgatattgtccgttattttctttgccacaacttttccagccacgtccgtaaaagggtacgcctaatactagtttatcgactggaacaccttcatttgtataaacatttatagcaccatctacgtaaaaattcgtatttgctgctggatcatttggatccttatatagagctgcattatgattagaagtagcttcccatccgccgtggaaatcatatgtcataatattaatccaatcgagtatttgagaaattttctttagttctgtatgatcagcgtagcgttggcttgcacctgaagcgattgttagtaaatattgtttgccatcttcagcacctgctttattcaaagcatttcggacgtcttgaagaaggagagtgaaattttgtttatcttcaggacgataactaccaccaggaatcgtttcaacgcccggatattcccagtctaaatctacgccatcaaacccatatgcgcgaagaaaagctactgtagattcagcaaatacttttcttgttttttcatcagcggccatatcagaaaagcggttagaccaagtccagccaccaacggaaataattgtttttaagtgaggatatttagcttttaatcgttttagttccccgaaatttccgcaacgggcatatttatcgcaatcttcccaagttgtccctgagccaggatacgatttggtaacatcagcccatggttccccgagtacgagagtaccattaggaacctctttattttgcaatggtacaccagattctttacagttccacgtttgtttatttggattatcaggatgagtagaagggtttccatgttttccattccaacaaatatccgcgaaagcatagttaaggtgagtaagttttgatgcatcaatgtcagcaacttgataattacgtccgtaaacgccccacgaaggaaagtacccaacaattttttgactttgctttggtgaatctgctaatgcgagatttggagtaataaaatttgtgagaaaaagaggtaagaaaagtagtagggatagtaatagcagtgtgaatttttgagacctcatagccatttctcctttcaaaataaaagatatatttaaaggcatacgccaataaatcaaaatgaatctagacgtgtgaaacgtctagataaaatgatcagacatcacgaagtctatacaagggagctgggggtgattaaatcgtaacaaatgtaagatttagtgtaaacgctttattaagttgaaaaagactttctcaatacaaaaaggcttgaatacaaactatatatgaaaacgaaagattggtatgggaggaaatagctcattataaataaatttgagaaaaaattgtatggagccaattattaaagacgtagaaagataaggaaatatcatgtaaaataatagtaaaaatatgtaaaggagggaatagtgtggatgtgtttttgaacattgctgaagaaaaaattcgacaagcaatacggaatggtgatcttgattatcttccgggaaaaggaaaaccactacaattagaagatctttcaatggtacctccagaacttagaatgagttataaaattttaaaaaatgcgggaatgattctaccagaaatggaactacaaaaagatatattaaaaatagaggatctaattgcttgctgttatgatgaagcagagagaaaagaattacaagaagagttaacagcaaaaacgcttcgttttcagcaggtaatggaaaagagaaagattaaagatagttcagcttttcgtatgtatcaagacaaagtatttcgtaaattacgctaagagggataagatgactacatttaaaacgatagaagaattagcgacctatatcgaagaacaacaattggtacttctgtttattaaaacggaaaattgtggtgtttgtgatgttatgctaagaaaagtaaattgcgtattagagaattatgattacgtagagaaaatagagatattactacaagacatgcaggagattgcggggcgatatggagtatttacagggccaacaattttattatttcataatggaaaagaaattcttcgtgaatcacgcttcatttcacttgaaaatctagagagaaccattcaattattcgaggaataagggaggcttttaaatggaatttattattgtcatactattatttgttgtagttggaacaatcgtaacagcagttcgatcgaacaaaaagaaggtaaatcttacaaaacaaaataacattcataattcatctaacagctcatcaccattatttttctttgctggatctgataatgatagctcgcatgatggcggctcacatgattgtggaggatcttttgggggagatagcggaggaagctgtggtggcggtggtgattgataaaaatgcgccttatataggcgtatttctttttaaacaaacgtttgattagtcggcttacatatgcataaacacagttaaacaaacgtttgattagtcggcttacatatgcataaacacagttaaacaaacgtttgtttaatatttttaacatactaaggggaatggaaatgaaaagggaaccgaaagtgaaaaataaggggaaagtagtgttatttttattagctgcgggaggcgtatttcttgttaaattagcatttaaatttggaaccatacatatgattcgaacttggtttgaaagtacgttttcttaaataaggaatatagcctcttgcgatagaggtttttgatttgttattattagactgaacggtcggtttaaagaggtgtgaatatgagaagaagcgcagaagagataaagaaagaaattgcatataaagcagaaagtctattttcacagaagggctacgcagctacatctatggaagagatttgtgaaattacagagcgaagtaaaggaagtatttattatcactttaaaagtaaagaagaattatttttatttgtagtgaaacagcatacgtatgattggattgaaaaatggaatgaaaaagagaagttgtatagcactagtactgaaaaactatatggtctcgcggaatatcatgtagaggacatacagcaaccaatttcaaatgcaatagaggaattctctatgagccaagttgtaagtaaagagattctggatgaactgttagctttaactagagaatcatatgttatgtttgagaaattaattgaagtaggtatacagtctggagagttccgtgaagataatactcgtgatcttatgtatattgtaaacggattattatcaggacttggagtgctttactacgaattagattataaagagctgaaacgtatttataaaaaggcaatagatgtattgttaaaaggaatggcagctgaataataggtcagttgcttttcttacaaaataaattagaccgaacggtcggtttatgaaaggggaatgaaaatgaacgctttatttaaaaaccgagcatttatgctcgttatggcgtctgatattttacaacaatttgcaatttggatcagaaatatggctcttttgtattttataatggagcgaacgaataatgatccagtttctgtttcgttgttatcagttatggaatatgcacctatttttattttctcgtttatcggtggtgcgctagctgatcgctggaatccgaaaagaacaatggtcgctggagatgtattaagtgtactgtctattataggaattgtcttgttgttaaagctggattattggcaggctatattttttgcaacactcatttccgcgattgtaggtcagttttctcagccctcatcttcgcgtatatttaagcgctatgtaaaagaaggagaggtagcaaatgcgattgcatttaaccaaacattacagtcattatttctgatttttggaccagtggtaggatcgcttgtgtatacacaacttggtttatttacatcactatatagcttaatcattttatttttgttatctgctatcgccctttcattcttaccaaaatgggttgaaaaagagcaggtggcgagagactcattaaaaaatgatataaaagaaggttggaagtatgttcttcatacgaaaaatttacgtatgattacgatcacttttacaattatgggtttagctgttggattaacgaatccattagaagtatttcttgtaattgaacgtttaggtatggaaaaagaagctgttcaatatttagcggcagctgacggaataggtatgttactcggtggtattgttgctgcagttttcgcttcaaaagtgaatccgaaaaagatgtttgtattcggtatgggtatattagccctttcatttttagtagaagggctatctacatcattttggattactagtttcatgagatttggaacaggtatttgtttagcttgtgttaatattgttgtcggtacgcttatgattcaacttgtaccagaaaatatggttggaagagtaaatggaacgattttaccactgtttatgggggcaatgctaattggaacttcattagctggaggattaaaggaactaacttcactagttactgtgttttgtatagcgatggcacttattttattagcgatagggccagttgtacgtatgcaaataaagaaagaagatatcgctaacaaagaggcactaacaaattcattagcttcaaaataactattgtaagggagcaatattgctccttttttctttgaggaacttttgacaactatatgagccaattatatactgatgttgtaaaaacgattttacaggttaggagcaatggtgtgaaaaatcaaatctatgaattacgcactgaaaataatatttcacaaggcgcattagctgataaatgtaaggtttctagacaaacgataaatgcaattgagaataataaatatgatccaagcttagcgttagcgttccgtttagctgaagtattaggaacaactgttgataaattatttttgtacaagcagtagagtcgttcattataaggcgcacctttaaaaataaaaaagatcctcttcttatgagaagaggatcttttcttatagcgttttagtctttggactaggtggtgtaacggatgtattattttctggaactctagttagtaagaatcctccgataataaatagaacaataatactaagaacaccagcgtttgtttttcctgttaattgcgttgtaacaccgactaataccggacccataattgcggcaaacttcccaaatatattataaaatccgaagaattcattagcagattcttttggtactagttttgcaaagtatgaacgacttagtgcttgaataccaccttgagatgtagcaactaacattgctaaaatccaaaaatcaagtgtcgtttttaaaaaataagcatatgtgcaaataatgatataaataatgataccgacatatagcatttttttgccagtaaatgtttcagataattttccgtatagtaaagcaaatggacaagcgacaatttgtgttacaaataatatgattaatagattcgttgcactaataccgagatcggttccgtaagcggtagacatagtaataattgtatcgactccgtcaatatagaaaaagtaagcgattagaaacataaatacagttttatattctttaatatttttaaaagtatcagcaagacgtttgaagctcattctaataggtcttggatgacgctcaatatagtgtgtttgctctacgttttttagcattggaattgtaaataacccccaccaaagagctgttattgcaaaggaaatttgactagcaatgccgaccgataagggaatagttcctttttgagaaagaataataagagcgatacaaccgataaaaggaattgtactcccgatataacctaatgcaaatcctcttgtagaaattcggtccattctatcttcagaagtgacgtctactaaaaatgcatcatagaaaatgtttgctccagcaaagccgattaaggcgagcatatagcaccctagcaataagtaccactgagaggttggaacgactgctaacatacttgtaaatacgataccgagtccaaagaagaatgtgaaaaaacgttttttaaatcctttataatcagcaactgtgccaagaataggagcaagtatagaaattaaaagtgttgcgaatgagtttgcatatccccaatatgctgttgaagttgccccagatagtccagcttcttttgcagctgctttaaagtaaattggaaataatgcagttgtaatgacgagcgagtatacagagttcgcccaatcgtataatatccagcttttttcttgtctggacatttttttcatataatgttcccccttaaatttgttttactaacagtgtacaaaaataaaaattataaaaagagaaacagtgatgaattttacataacttttacatatatacacagttctttacaattggagtaaatcctctacaattgctccgtctgtttcacctaagtgtaaaccgagtagtctagcgatagttggaccttcatcaataagtctcatatacgggacggtaaagccactttttattcctttcccagcagcgataaaaattgtttcatagttaggttttgttggagagtatccatgcgtaccaaatgtatattttttactaggcgtaacatctttttcagtaatttcttttataaaatctcctgtatagttttcagtgaaataatacccttctcgtgcttctaacatgaataaacaattaacgtctgcaccgcagtctttggcagcttcatcatgaagtataaattcaattccgttttgtttattttgaagtagttcttcaaggagtagttgtacctcccggattgtatccgtatcatttttgtcccttacatatacataggcagagccgtcgcaactttggcaataggctttccagtctactaattttccttttttattaagagatataagtcctctttcatggaatagcacatttaattggatggatttgttttcacttaaagcgctatgatcaccaagggcaataattgtactttcttcgtataggtcactttcttttagtgcttgaataattttccctagacgttcgtcgtgtctctggatagcagctgttgtttcgttagattcaaagccgtgatagtgtctttgtgtgtctagatcggtgaaatgtacgaacatgacattaggctttttcgtctggattgtatgcacagcagaggcgaggacgaaatcatccagctctggttgtgataaaccatttcttatatggccgaaacgacgatttaaatctaattggtatagtgggctaccgctaaataaggaaactaacacttgattttgccaaggtctattggggaaaatttctggtaaattgtaatcgatgttcgctcttccagtaacaggccatagaagggcagctgtcgttaaatttgctttgcgcgcttcatcatacaatgttgttccttttattgattttcggtaccaatgccaatcaggtgattcacgccctggttgaagtaacgtattgctaacaacaccgtgcttgttagggtaattaccagttacgattgttgagtggcttggatatgttacagaaggataaattggttctactttttcgacaaccgtgcccttttttattagagattggaaatgaggtagtttttgtagtataggaaaatctaaagctgataaacagtcgaatgataaaatgatgacgtggtttgttaatgctttatccataaagttccctcctgattatataaaacctattattatatattactattaacacctagtaataaatacatatatttaggtgaaagtttattatttattttcagaaaaattaaacatataattaagtataagggaatctatggagggagggaacactatggattggttagatggatttggtattttttacatcattggcggaatcacgattatccttgtatttactatttcatatttactaaagaaacggtttccagacaaacagtttgatattatatttgcacttagtttaatacttctttgcttagcgtcctttcccgttacaatgatggttattggtgggtgggaaggaatgggatatggatttattggtttcttcgtcctaattggtacacttatcggtatgattgcacatcaacttgtgaaaattacgcggaaaagctacgtataaaactacaaaaaatgaaaaggatatataaaaataagaaaattagctattgttttaaaaaagaatttgtattatgataatcaacaaatttatttcgttataacgatgaaaaaggactagtacatgttcaacctttttagcagagagagaatccgtcaggctgaaagattcttaaaaaggcaatatggaacctgcctttgagttctgcatatgcagcgggaatttcccgttatcaaaaagagagcatgcgcaatttttgtgcatgaatcagggtggtaacgccggcaaagctcggtccctatttagggacgcgggcttttttgtattttctagaaggaggaagactgactatggcaaaagaacaagtgcaagccattacgaagatggaagaggactttgcgcagtggtataccgatattgtaaaaaaagccgaacttgttgattattcaagtgtaaaagggtgcatgattttacgtccgtatggctatgccttatgggagaatatgcagaaggtgatggatgagaagttaaaaggaactggccatgaaaatgtatatatgccaatgtttatcccagagagtttattgcaaaaagagaaggatcatgttgaaggatttgctcctgaagtagcatgggttacgcatggtggagatgaaaagttagcggaaagactttgtgtacgtcctacatctgaaactttattctgtgagcacttttcaaaaattgtgcaatcctataatgatttgccaaagttatataatcagtggtgttcagtagttcgttgggagaagacaactaggccgttccttcgtacgactgaatttttatggcaagagggtcatacaatccatgaaacggcagaagaatcgcaggctgaaacattaaatattttaaacttatatgcttctttctgtgaggattatttagcaataccagttattaaaggacaaaaaacagaaaaagagaagtttgctggagcaaaggcaacttatacaattgaaagtttaatgcatgatggaaaagcacttcaaacaggaacctctcataactttggcacgaatttctcagaagcatttgatattaagtttttagatcgtaacggtaagtggcaatatgtgcaccaaacatcttggggtgtatcaacaagaatgataggcgggctaataatggttcatagtgataataatggacttgtaatgccaccaaaagtcgctccagtgcaagttgttattgtaccgattgctcagcataaagaaggagttttagcaaaagcaatagagttacaagaacatattcaaaaggttgcacgagtaaaaatagatgctagtaataaaacaccaggctggaaatttaatgagtatgaaatgaaggggattccaattcgattagaagttggccctaaagatattgaaaagaatcaagttgtacttgtaagaagagacacgaaggaaaaagagtttgtaccaatggatcaattagaagaacgtattccagcattacttgaagaaattcatattgctttatttgataaagcaaaagcatttcgcgatgagaatacgtatgttgcgacaaatttcgaagagatgaaaaaaatagctgacgaaaagcaaggctttattaaggcaatgtggtgcggggaattagcttgtgaagaaaaactaaaagaagaagttggagtatcttcacgttgtatgccttttgagcaagagcatttagctgaagaatgcatttgttgtggtaaagaagctaaacaaatggtgtattggggaaaagcgtattaatactttttctgataggtgataaaaaggactttgggctgcataataaaatgcaatccaaagtcctttttagttttataaagtatttcatgtattctttagatggaagtatgttgctcttattttacgtttttacgacgaataaacagtaacataccaattaggaatattgaaagacccattaaaatagatatagggtaatgcgttgcggtattcggtaatttatcaccttgttttttcgtattatcttttacattacccccttgagaaccgttgccctcctgagaattgctatcgcctttaacacgattgccaccttgagagccattaccgccgtgtgagccactgccaccagaaccatcgccaccagaacggttaccaccagaaccgttaccgccagaaccgctgccaccagagccgttgctaccagaacggttaccaccagaaccgttatcgccggaaccattgccgccagggccactgccaccggaaccattaccgccggaaccgttgccgccagagccgctgccaccagagccgttgctaccagaaccgttaccgccagaaccactgccaccggaaccactgccaccggaaccgttttcaccagaaccactgccgctagaaccgttgccaccagagccatcgccaccagagtcattgccgccagggccactgccaccggaaccattaccgccggaaccgttgccgccagagccgctgccaccagagccgttgctaccagaaccgttaccgccagaaccactgccaccggaaccactgccaccggaaccgttttcaccagaaccactgccgctagaaccgttgccaccagagccatcgccaccagagtcattgccgccagggccactgccaccggaaccattaccgccggaaccgttgccgccagaaccgccagaatcactgccgctagaaccgttgccaccagaaccgttatcgtcggaaccattgccgccagggccactgccatcagaaccgttaccgccggaactgttgccgccaaagccaccagaaccgttttcaccagaaccgttttcaccagagccgctgccaccggaaccactatcgtcctgagaaccgttatttcctggaggtttattattatcctttgagtttccttctgcaaaatgatcgctattttgtacaatagcgtttgttaatggttggaagttttcagttgcagcattaccgatatttaaaccgctaaaaaaagatagagagagtgttgatgctaaaatgaagattttcgtcatggttttcctcctaagaaatgaatgttccatctaaaatacatccctttgtaatatttcttaggaaaaagagttttatgcaaaaaaaactatatatagaaaaaggtggtatatttgtcaaagcagaaaagagttaatgtagatttcctacaaataatagaggtggagaatttacattcataacggtagaggaagtggcagtagatgaaaaagtatatagcgtttgatattggcggtacgcaaattaagtatggcattatttcagaagcagggagagtattaaagcgtaaaacagttgcaacagaaattcacttaggcggagaacaaattattcaaaaactcattcttttatcaaaaaaattaatgaatgaacatactattgccggaattggtattagcactgcgggaattgtgacgggaggcgcggatcatattccgggatatagtactattcctattattgatagattgcaagagatattaaaagttccagtatcgattgacaatgatgtgaattgtgcagcgtttggagaaaagtggaatggtagtgtaagagagaaagagaactttattatgctcaccattggaacaggagttgggggagcaatttttatagatggagaattgtaccgaggacattcatttagtgctggtgaatgggggaatatgctaatagaaggaaaaacgtttgaagaggttgcttcgatttcaggattaattcggcttgtaagaaaatataaaggcaaaggcgagtggaatgggagaacaatttttgagttgtatgataaaggagatagagaagttgctcaagcagttgggattttctttaaacatttggcaatcggaattagtaatcttgcttatatttttaatccagaaacaattattattgggggaggaattaccgatagaggaaatgagtttttaaaagaagtaaaagaagaggtcagtaaatacttaaatcaagagatttataataattgtgagattgaacttgcacaaaacggtaattgtgcaggaatgattggtgctatttaccacttattacatcatcataagtaaattatatgaatgttttcatataactgagaatttatcctttttatcaataggtaaataatgctacaatataagagaagaatacaatattttccgatatggaaaatgctttgtagaaagggagaaacttcatgcctattattttagaaaaaggtcaaaagatcgatttaacgaaaggacaaccaaaagtagcaaaactacaggttggcttaggctgggatccaattgggcaatcaggtggatttctgtcttcattatttggaagtaaaccaaatatagattgtgatgcatctgttgttatgttagaaggagatcgttttttaaacaaaaatgatttagtttacttcggaaacaaactttctacttgtggtagtattattcattcaggagataatttaacaggtgaaggcgaaggtgacgatgaaacaatctttgtagaattacataaagtcccaagtcgtattaaccgtttagtattcgttgtaaatatttatgactgtgtaaacagacgtcaagactttggtatgattcgtaacgcttatattcgtattcaaaatcctcatacaggtgaggaattagcacgttataatttatcagaaaactatgctagtaaaacaactttaattgcaggagaaatgtatcgctacgaaaatgagtggaagttttcagcagttggagaaggcacgcaagataaaaacttaagtgagattgtatcacgttatcaataggataaactaaggaggaatttttaaatggcatctatttctttaaaaaagggacaaaaggtagatttaacaaaaacaaatccaggtttatcaaaggtacttgtagggcttggctgggatacaaatcgttatgatggacaagctgatttcgatttagatgttagtatctttttagtaggtgcgaacggtaaagtttcaggagcagaagatttcgttttctataataatcccaaaggtgcgaatggtgctgtagagcatttaggagataaccgaactggtgaaggcgaaggcgatgatgaagcgattaaaatcgatttaaaaaatgttcctgctcacatcgaacgtatttgtttcacaattacaatttatgatggagaaggccgcagccaaaactttggtcaagtttctaactcattcgtacgtattctcgatgaagaaaagaatgcagagttaattcgttacgatttaggagaagatttctctattgaaacagcggtagtagtaggtgaattataccgccatgcaggtgattggaagttcaatgcaatcggaagtggattccaaggtgggttagcgtctctatgtaataactttggtttagatgtagagtaatagatttaatttatatatccattggtgaaatgcatgtttactgatgggtatatttttaaagataaaaatatagaggtgaatataaatggctattcagttacaaaaaggacagaagattgatttaggtaagacgagtcctggtttaacaaaagcagtaattggtcttggatgggatattaaatcttatgatggcggagacgatttcgatttagatgcatctgcttttttattagatgcgaacgggaaatgtacgaaggaaactgattttatcttctataataatttaaagtctccttgtggatcagttttacatactggcgataacagaacaggtgaaggcgaaggcgacgatgagcaacttgttgtagatttgaaaaaggttccagcagacgttcataaaattgctattacagttacaatttatgatgcggaaggccgtaatcaaaactttggacaagtaggaaacgcattcgttcgtttagcgaatgaagagacgaacgaagaagttcttcgttttgatttaggggaagacttctctatcgaaacagcagttgtcttttgtgaattataccgtcataatggacagtggaagtttaatgcagtaggaagtggattccaaggtggtttaggtgcgcttgtaagagcgtatggcttggatgcatagaaaggaaacgatattcgtttcctttttttgacctttctataaatctagcaaagaataggggataaaggtaagatgagtattttgcaaggaatccttgatacgtatgctcagtttttcgacttggacatgtggattaaagtgttgcaagatccagtatcttggggattaattggtacacttgttgtacttgaagggttgttatctgctgataacgcacttgtgttagcggtaatggtaaaacaccttcctgaagagaaacgtaaaaaagcattattctatggacttattggagcttatatattccgctttattgcaattggaatcggaatgttcttaattaaattatggtgggtaaaacttcttggtgcactttaccttgcttggttatcagtaaaatactttattgataagcgtaaaggtgcaggtgaagaagaggaagctcatggtatgaaccaaaacagtattttcttcagaatgttcggtgtcttctggggaacagttgcaatggtcgaattaatggatatcgcattctctgtagatagtgtacttgctgcatttggtgtatctaatgaagtttggattttattattaggcggaatgctaggtattttaatgatgcgtggtattgccggtgtattcttgaaattattagagcgtattccagagcttgaaacgacagcatacattttaatcttaattattgcatcgaaaatgttactgtctttaatcgagattgagattagtcatacactattctttattattttagttgtagcatttggagcaacatttataattcactacatgaagaattctggacaagctaaagaagaagttgcagctactaaagaagataataaataattgaaatgggtttgctcgttttgcgagcgcccattttttataacaaaaaatagtttataatagaagaaggacttagaaaaaacgtaactgtttttggaggtgaactgttgtgttttcacgttttacacttcaaccatatgcattaaaagatgaatcagatttaaagcaatttgaaacgcttttagaaaaacgtccacaatatgaactgacagagaatgagatgaaatttagttatatagcatgtcgaatccttggcgttcctaatgatgtagatgaatattttaatgaactgtttgattatagtgaagcgaaaggaatcgaagttttacacgaacaaaatttaaacaaagtgattgattcggaaaagcttcgtcatattcaagaagtgttcggattacatcaagaagcaccaaatggtctgacagtaaataggttagttgcacacttatctgggaaacaacttttaccgaaagtagacaatcctgatttacagcattacatacatacgacgtttatttcactattgaaattatatgagaaacaacataatcagtcgttaaagacagaaggcttccgtcgtttcttaatcgacataattaaactaagcgaaaattatgtagcgaagtggtttactacgattaattataagaaacagatgccgcgtatcgtttggtatggtgatgcacaggaaagccgtatatatttcttatactttcttattatgctcggttgtgatgtgctttattatcacccagaaggaaaagatggatttgagaatgttgatgaagagggaaggacctttattgtgtctcatccaggccgtatttctcttgaaccatttccagatcgccgccgcgagcgtgtggcaacagtagcgtatcaagcttcaaaagaaattgagcaagtacttcaccacgataattcactgctgtacaagccgtggcaattccgttcctatacgcctgtagctcgtacactaaaaacaacatatgatgagctctttttaattacgaaagaaaaggcgtttgtacgcccgacattctttgttgaaaataaacatatttatatcccttctttatttgcgaaaatatcaggcgtttcaaagaatgataaagagtattttcaacgattaaaggctgttacatcatttgataacagtatactagttaatacattcccatttacgaaagagcaaaaagcaaacttccaatatcattatcgagatgcattagaccgtggggggaaattacatcctgatctaattatgaatagccattggtggccgcataagcgtttaccggaaggtttacaacatgggattgcagaagcgattatccatacgtgtgaaagtgaaatgtgcaaaccaattgcgaaagagacaaaacaagatgtagcgctatatgttttcgcgcaactttctcaaataccaccgaatattttagaacagcttgagaaatttgattattcacaagatgtgccgaaaattgttatatttaataatgagaagagtggagagttaactcgttctgatgctgttttattactatttttaaatcaaattggagtagatgtattccatttcaatccaacgggaagaaacgatattgaaccgtatattgaagcgggggcatttgattcccattggcttgaagaggttaatttcgatcttgagtttcatggttcatcagcctataaaaatttatcacaaacaataaaaggactatttcgtccatttttataaggaaagggagaataccatatgaataacccagtcgtactagatccgaaaacagaattaaatgagcaaacagcacaagatattcgcttgcaacttagacaagatgcggatgtacaacgtatttataatgcagtagatattaaagatcaattagaattaattgaacttggaaaagaaccttctatggaaatttcacgttttgctgatcaaattttacatacaatgtcattatcaaagatagaagattctggtgaattattaaaacagcttggtaaaattatggacagatttgatagcaaagactttgcggaagagaaaagtggtttcttctcacgtatgttcaaaaaagcggataaaatgattgaacaaatctttagcaagtatcaaacgatgggccgtgaaattgataaagtgtatgtggaaattacgaagtaccaagatgagatgaaaaaatcaattggtacgttagatggcttgtatgagcaaaacttaaaatattatttagacttagagaagtacgtagtagcaggagaaatgttattagagcgtttaaatacagagttagttccgatgtatgaagagcgtgtgcgtaataatgatcaattagcaggtattgaattagagtcgcttaaaaactcggttgaaattttagagcaacgtattgatgatttagaaaaagcgcgtatggttgcgctacttacagcaccacaaattcgtatgattcaacgtggtaataataaattaattggtaaaattaatacagcatttattacaacgattcctatttttaaaaatggtatcattcaagcggtaaatgcgaagcgtcaaaagcttgttgcagattctatggctgaactggatcgccgtacaaatgaattacttaagaaaaatgcacaaaatatcgcaacgcaaagtgtagaagtagcgagattatcaggttcttctagtattaagatggaaacacttgaggaaacttggaacattatttcaagaggtatgcaagaaacacaacaaattgaagaacaaaacaaacgtgagcgtgaagaaagccgcaaacgtatggctacattaacagagaatatcaaaaaagaattacaaggataaagtgaaactttaatcagtggggttttgttcatccccaccgattattagccttcacaattggacatttatgggcagttaatctaccacctaacttctttgctcaaactgaattttgaggtgggagttttactgcacggaaaatagtagggtaaatgaaaaggcaatgaggactattcctcattgccttttagtttctcttcactaatttaataatctcattcacaataagtggaatgatacttaataagagaacaaatccccaatctcgcatcgttaatgcatgtacaccgaatatatttgcaaggggcgggatggagatgatacaaacttgcataagaacaccgataagaagggagaagactaaatatttatttgtaaagatcccaatggaaaaaattgatttcgttcttgaacgcaagttaaatgaatgaacgagctgagaaaaactaagaacgacaaatgccatcgtttgagcgtgtaatagagcatcctcatcaatttgctctgggaaaagagggaataaatgtgtatctccagtatagaactttgctccggcgataaaggctattagcgtcaaaagcccaatgacaatcccattgaaaataaggaaaggaacgctaccactaaataagctttctttcgcatgtcgtggtttttccttcatcacatcaggatcttcaggatcaaccccaagtgataatgcaggcagggtatctgtaattaaatttacccacaaaatgtgaataggtcgtagtggtgttgcccagccgagtaaaatggctaaaaataaagtgataatttctccgaagttacaagagagtaggaagagaattgatttttttatgttacgataaatatttctaccttcttcaacggctttcacaatagatgagaaattatcatctgttaacacgacatctgctgccccttttgcaacgtctgttcctgtaatgcccatcgctacgccaacatcagcttgctttaaagatggtgcatcattgacaccatcaccagtcatagaaacgatatttcctttcgcgcgtaatgcctttacaattttcactttatgctctggagagactctagcgaatacatttaaatgattaattttgctagctagttctgtatcagaaatgttatctaattcagttccaatcataatttccgatatttcttcagcaatgccaagttcttcagcaatgccaagttctttggcaattgcaaaggcggtatctttatggtcaccggtaatcataactgtgcgaataccggcttttttacattctttaattgaatctttcacttcagttcgtggtggatcaatcataccgacaagaccaataaagataagattttcttcaagatgatttatatccatatcgtttgaattgtattgtttaaatgcgaatgaaagtactcttaaagcttcttgagacattgctccggcagattctaatatttgatttttatcagaatcagttaaaatctcgattttgccgtttttaaaaatatgggtacatcgaggtaagagcttatcgatagcgcctttcgtcatgctatagtagctttcatcgtatgtatgcacggttgacatcattttacgatctgaatcgaaaggtacttcgttaacacgttcatgtattttttctaaataatctttttgcatgttaaaagtggttccagcaacgagaagtgcaatttcagtcgggtctcccgtttgtgattcgttattataagacgcatcattacatagcaccatattttctaacaatagacgttgcgcatcattatttacatttaaactttctaagcgatcgtatgtgttatcactataaaagtgagtaacggtcattttattttgcgttaacgtacctgttttatctgaacaaataattgtgacagaaccgagggcttcaacagctggtagtttgcgaatgataacgttttgtttaatcatacgttgcacaccaattgcaagaacgatggaaacgatagctggcaagccttctggaatagctgcaacggctaaactaatagcagtcataaacatttctaacgtatcccggccttgtaaaaaaccgatgaggaacataatgatacaaatagctacagcgacaaagcctaaatattttccgacttgtgctaagcttttttgaagtggtgtcatatcatcgtctgcttcatgtaaaagggtagcaatcttaccaatttgtgagttcattccagtttcaacagcaacaccgacgcctcttccgtatgttacaagagtagacataaaggccatgtttttttgatcgccgagtggtacttgttcatcactttgcatggaagggtggtagattgcatctttatcaacagggacagattcaccagttagagcagattcttcaacttttaaatttgcggtttcaataaggcgtaaatcgcatgggatatatcgtccggcgtcgagcataacgatatcacctggaacgacgtgctcagatggaatttcttttagttcaccatgtctcttgacgatggctttaggtgttgccatcttttttagtgcctctaaagcttgttctgctttagattcttggacaacaccgataacagcatttaaaactacaacaagcgcgataatactggcatccgcccattcacctacaaaggcagaaataagggcagcaataataaggacatatacgaggacgtcattaaattgggcgaaaatacgctgccataaagtgcgtttttgttttgtagctaattcattagaaccgtattgctttaaacgttcacttacaatttcatctgttaaaccgtgttgttcgtttgtttctaggtcaattaatgtttgatctttcgtcttactgtaccaattgctcataagtaagcacctccagtaaaaacagttagcaatggtagtgttgctattatttgtgagtagtatgtatggagaaaaatctaaggtgaggttctacttctattgtacaatattttacagttggttgagggaaagagaagagttgtcatgaatttgttggaaataaaaaagagcctcatataagagaggcttttttactttttaattaatgtacctaattcttctgtaatagcttgcatttcactaatgctgaatgtttcacgtttcataacatgatcataaatgtcacgtaaatcttcgtacatttcttcgttaaaactagcagctctcatcgctccagcattaaccatacgtaatttttctttaatagcttcgaccatatattcaacgttttcttctgactttacggataaatccaccgaagtgtccccctttaaaataacataaggctatcttaacattttttatcattttcgttaatgaatcttttcaatcccattaaattagtagggatttcctttatatttaataattggttgtttatactataagtatatataaagaaatgcaccaagaagggaagaaacaaaagtatggttcaagtattgtttgtttgtcttgggaacatttgccgttctccgatggcagaagcgatttttcgaaatcttgtcgtaaaagagggacttgaagagaaaattgtcattgattctgcaggaactggagattggcatgttggccatccgccacataaaggaacacaaaaaattttaaaagaaaatgcagtcacttttgaaggaattaaagcaaggcaagtagaaaaagaagacttaacaaagtttgattatattattgccatggacaacaagaatatagcagatttaaaaagtttaggtaaaactggaggctatattggtaggctgtccgactttgttccagacggtggctggacagacgttcctgacccttactatacagggaatttccaagaagtatatgaccttgtaacagaagggtgtgcaaagctattagctttcattcgaaatgaacaaggaatatgaggaagcttagaaagaaatactttctaacataagaaatgaaagggtgaaggaatatggcaaagaaaaataatattgctcgaaacattgcgattggtgtagcggcaggtgtagctgtatccatgttaaagaaagaaaaccgtgaaaaagtaaaaaatacagcagaaaaagcaaaaacaaagatgattgaaattggtgaaaatgcaaagattaaagaaaaagtgcaaactgttacagataaaggacgcgaacttgctgatttcaatgtggtaaaagcgaaagtagcagaaattaaaaaattaacgccatctgttgtagagacgttaaaagaaacgaaagaaatttttagtaagaaaaaagttgagccagaagaaaagccagaaacgattgaaattcaagctgtatctccaaaggtagatgagctgaaagcagaagaagagccagtagttgctgaagatggtggtatgaaagaagcgcgtgaattatttatgaaagactcaaatgcagtggaaaaaaaaactgaagcgtacattgagttaaagcaagataaagaagagaagaaaagcgtttaaacatatatgagaaaaattttagaaaaggtgagaagaaatcgtacttattcgtttggtaaagatttatatgaccggacgatgcgcgatgatgtagcgggcttggcagcacagctcgcttatttcttcttgcttgcaatttttcctgggctcgttttcttaattacgcttcttggatttattcccattcaaacagaggatgtgcttagtttattagaggtttatgtaccagatgatgcaatgaacttaattgaggtaaatgtagataaagttgtaaaccagcaaaatggtggtttattatcatttggtttattatccatgttatggtttgcctcaaatggtgttaatgcggttatgaatgcttttaaccgcgcttatgacgtgaaggaaacacgttcttttattacaacaagagcgttatcaattgtgtttacattagctattatttttatgattgtctttgcattaattgttccggtattcggacaagttattggagcagcagtgtttaaagcactcggtttatcagatagtttttctttcgtgtggagcattacacgattagtagcgagtttcttcgtgctatttgctttgtttagtttcttatatacatttgccccagatcgaaagttaaaaagaagagaagttatttcaggggcgttatttgctactgtaggatggattgtggtatcgtactcatttgcttattatgtagataagtttgcgaattacgccaatacatatggtggtctcggtggtatcattattttaatgttatggttttacttaactggatgggtaattttacttggcggtgaaattaatggtttactccaccattatagaaccggtgacaataattcccgtaatgaataatgagctcttgttccataataaaaaggaacaggggggatatttcatgagtaataataaaaagaaccataataataaaagtaataataaacaaaagagcagttcgcatccaaagcataaaacgagtagcagtgcgaacggtcataatagctatcattaaaaaaaacgggtcctctatgagggacccgttttatttgctgccttttaataatcgtaagccattcaaaatgacaagaatcgtacttccttcatggccaataacaccgaatggaagagctaaaaattgcaagaagtttgaacaaattagcatggcaataacggctagcgaaaagattacgttttgcttcacaatacggttcattcgttttgataaacgaattgcttgggaaagacgagatagttcgttcttcatcagtacaacatccgcagtttctaaagctacatctgttccttctcccattgcgacaccaatgctagcagtagctagtgcaggtgcatcatttataccgtctccgaccattgctactgtaccgtatttttcttttaactttttaatcgtttcaacttttgtttctggtaaacatgatgcgtaatattcctttatattactttcagaggcaattgcttttgccgtttcttcattatctccagtaatcataattgcttcgacaccaatgctttgtaattcacgaatagcagctattgtttcttggcgaagcgtatcttttaaagcgataagtccaagaatgcctccctcatcactaatataaacgacagttttaccttccttttcaagtgaggcagaaataccattatgaaatgtttttgtttcttcaccgataaaatcagctttacctattttataagcgttgttttcgaatattccttttagcccaaaaccagttacatcttcaaccttttcaggtttttttaatgtaatgtcgtacgcatgttgtgcatatttaacaatagatgcagccaaaggatgtgtagagtgactttcaatggatgctgtaatagaaagtacttctttttctgtcatattttctcgaacatatacatctgttacggtaggttttccttctgttaatgttcctgttttatcaaaggcgattgcttttactgaagcgaggcgttctaaatgtatgccacctttaaagagaattccatttcttgctccgttagaaattgcagataacgttgctggtgtaatggcagcaacgagtgcacaaggagatgcgactacaagtaagatcatagcgcgataaaacgtttcattccagctccagtcaagtaagaaatgaggaacgaacatcataagcgcaacaacgagtagtacaccttttacgtatgttccttcaaacttttcgatgaatagttgtgatggtgatttttcactttgtgcactttggacgagacggataattttttggaataatgtttgatcgcttggcttcgtaattttaacttcgatagcaccacgtaaatttacagtacctgcaaatacttcatcgccatgtcttttctcatttggaataggttctcccgtgattgctgcttcatcaatatttgtttcaccgttatgaatcgtaccgtcagcgggaacacgttcacctggtttaattaaaataatgtcgttaatttgtaactctccaacaggaacacgttcctccgttccgttggaaatgcgtaatgcttcttcgggttgtaagtcaagaagagcggaaatttctttttggctcttacttaatgtataagattccatagcaccgctgagcgcaaagataaagattaagatagccccttctgcccagtagccaataattgcagcaccaatagctgcaaagagcattagcatttcaacatttagctctttttcttcaatcgtatcttcaatgccttctttcgcttttgcatatccaccaactatataagcaaggatatagcaagtaatacctacattcattacatcgttttttgtgaataaccagccaactaaaataaaaataccagatgctactgcaaatacaagttcataatgtttttttaatgtgtcccataaagagggatgagaaattgtttcttttgactgtaacgtttttacttctgagttcattactacccgctccttccgcattcttattgagaaaaataatcaaaatcgaaacccctataaaacgacgaaagctgccatccataatggatagcagcatttctgttgaatctgtttttaatagttcttatgttgtaattattctatagtatatcatatgtttttatgagatggtacggttttgtttcaagtataaacggaaaacttgtgttttcgcaactcctctggtatatatgaatattgttcataaaaagatcggaaaggaagacaacaagtgaagacagagaaaatttttacccatccgattggcgtatttattgctgcaatagtagcaacttttttatggggaagcgcatttccttttattaaattaagttatgttgaacttggaattcaaccacaagaagttggagagcaaatattatttgccggttatcgtttctttttatctggagtcatgctcttattattctttaaagtgttaggaaaagatatgagcttcaaaaaaggaacagggaaacagttaatacaaattggtttattccaaacgtttcttcaatatatctgtttttacattggaatgagttatagttcaggaattgaaggagctatcatttcaggaacatcatcattctttcaaattttactcgcccattttttatataaagatgatgctctcaatatgagaaaattaattggggtatctattggtttttgtggcgtcattttagtaaatgtgccgagtgatggtagcttatcatttcattttgggatcggaagcttattacttcttagtgcagcatgctgtattcatatggaaacatattagcaaaagaaggtagtaaaacattagatgttggctatatgacagcataccaaatgatttttggttctataggattattatgtataggggctttacaagttggagtcatgccatttacatttagtctacatgcactacttatgctaatttatttatctttcttatctgcagctggtttttgcatttggaatacaattatgaagtataacaaggttggaaaagtatctatgtatatgttctttatacccgtatttggtgtgttattatcgagcatgattttaggtgaagcaattcattcatttgtgctactcggtttagcatgtgtagccgcgggaatcattgtggtaaataggacaccagctaagcaaaaaatggagcaagaaaaacaagtagcatagagagcagaaaagcgattacaatggaagaacagtactgttcttcttttttcatagaaaaaggataatagactaagtgtaacgaaaaaagatacaaaaagcatttattgaggagaaaatattatgaatctactttacgtggtgttaattgggcaaatatttcttttttttattggtgcaatttatgcaatggggcagacaaaaagaacgaaagataatatgccgttacctttagcaattcgtcttattcttagtttttctttaacaggtagtgcaatttgcatatggttacaagatccatctgtagagtatagtacgtgggttgcacttggtatgactttatcgactgtgggagatttgtttatggctgggctgattccaattggtcatcgattaattggagggatggttactttcgctcttgctcattgtttttatgtaaaagcatttttgcaaacaggaatttcatggaatggtttttggattggcttactcgtatatgggctctttctaattgtaggatggttcttctttatccgaaatgataaacaggataagttgtttacgataggagctctaatttacggattgtgggttggaggaatggcttgctttgcattcgccttatattatgaaaatacagggatatggtggataccagcgtttggtggcttactgtttgtaatttctgatttcattattggcgtgacagatatcggagggcgtaaattgaagtatgagccactttggatttggcttacatatgtagctgctcaaatgtgtattgtatatgtgggattataaaaagatactctcaaaaatagtggatagactattttgagagtatcttttttgcttgttaatttgatcagtatttttattgtgaaatttctaatattataattttacaattcagaattttgtagaaaatcaccggtcgtattatttataataaaagtaaaaagatgatgagttggtgaaatgatgcaaaagaaaaaacgttggcgtgaattctttggaactattgcaattgcatgtttattggtgtttttggcgaaaatttttgtgttttttccgacgactgtaaaaggagcatctatgaggccaacgttgcaagatggagatagggtgattgttaataagttagcaaaacaatttgaaagctatgggagagaagatattattgttgtgaaaacagataatttttatgtcaaaagagtgattggattgcctggagatataattgagatgagaaatgatcaattatatgtaaattctgaaatgaaagatgaagagtatttggatagtaataaaaaacaagcagaaaaaaaacttatgaatttaacagaggactttggaccgattacagttcctaaaaataagatttttgttatgggagataatcgcttaataagtaaagatagtagaaatggtttaggttttattgatagagaagatgtgttaggaaagttagcaggcatttattatccgtttgaacatatgaaaataataaagtaaaaaaaccaagcaaattttagtttgcttggtttttttgttaaacagtaggagattcgtttgatacaaagatatcttcatgtttctttgtagtacttaaaacaaatttatgttgtagtaattgtagtttaaataacgccaaaggatcatgatatgtttctggattgcttcttagcgtcgctaatgtttgctcgtcttcctgtatctcaagttgagctgcatctacattttgtttcaatatattaagtggatctttgaagaacatcatgatatcacgttctaatgcaccttcaaatacttcaaattgaaggaagaattgtttggaaattgtgtgagcaatttctgtatagtcttctgtttcaatatattgtttatatttgttggcgagcatagattggtttttttgcatattaccaaataattttccggcactttttaagaaaaactgtgtcggtgtaaagcgtaataaaatattgatgttcgttactgtaattcgatttgtcattcgtgcaacatctcgattccaatcatctaataatttgaaatcgcaaggaagtttcatacgttcttctttatataatttattaaacgtttcactcatttcatctaaataagcttgagcttgaataaattcattatgtgctgtttcaatccattcttgaatagacccagtaaatttaggaagaagtacctgttgtacatgcttttgaacacgttcattcattgcagcatttaattcttcatgaactagtttgaaatcactatcttcttgaacaagatcagagcaactctgtaataattcaggaatttgagaatgtatatctcgtgtaatttcttctttcgttaaaagataggattcggtaatagagcgaattttatctttttcaagagcagtaaggttattaataaatccagtaagtttcactgagatgtgtttattccagcgtacggattttactaatgtattttctaattccacacgttcatttatgagataagcaattgtcttttgtgtaaaccatattagcttttctatacgttctttttctatatcgcgttttgcaagattagagagaatagattctgttacatctccaagttgctggctactctcttgcgaaggagagtatgggaagaattgtgcatctggaaaatgtactttaagtttactaattagtttttcattagtagtcgtattatttgtgtgtaatacgaagtgaatttgtaagtttggtacttgttcacgtaaataaattaatgtatcaatttctttactatgcaatggtgaagaagaatttaatacgtaaacaagactatctgctgcttgtaagtattcaaagtatgcattgtttttatccaattgctcttgaatggatggtgtaagaagaaatgtaaacttattttttcttaaaaacctacttggtagcttaatttctatacattttttctcaagttctgactgagcagatgtagccgttatttgatggaattcatcaaggttagggatatttcgtatatctaactcggtaaattctgttatttcagtttgactagcgtctttaaatagaataggagttgttaaagtttcagttaagatgttctctcccaatattgaattaacaaatgatgttttatcatggtcactagttccagctattagtagtggtgtgacatttaaatcacatagttcatggactagtagcgtaaattgatgacttaaatctacatcatttttctcagcccatacagcgattgtttcgaataaatgagaaactgtttccatatttacatctgcttcagctgatgtattagaaagtaaggatccagcactttttacgagtaatgattctaaagttgtaggtgagacttcattccatgctaacactgctgcagagacaactagagaatcttttgctttcgttaaactaaaccaatttgttaataaatttggtacaagtccgtttaattcatgcataaaatgatttccggtaattaatgcaaagtatgtttcttgatagcgagtagaaatttcattccaatcgtcattattgtctgtttcaatatgcaagaataaatgattaatactttgaatccaaggaaggtataaggattcatgttgatagctattccaaagagcaataacaagctctttaaattgagcttgatcaacagcatatagagcttttaaagactcatagaaatattcaggcttaatattttttgtaaatcctttgtttatgtaatttattaacgtatcaaaccagtgtaaagattgtgttcgaataccttcttgaacagctagttcgatagcgttgttccaatcttcttgtttttcatagaaagaacgtgcaattgcagtaatatttggataatccggttggaatgcaacagcttcactaatcgtcttaaaagcgagtcctaaacgatcttgttcgatataaagagaaagaagttgtaaggaaacctccatcgtaagagttgtatcttccgtttgaatagattgataaatttcttctgcctttggtaagaatcctagttcaaaataagcatctgcaatattttttgtcgcccaaagtgcaagagcattatttactttttcccatttaaatatagctgcttcaaaatctttattttgataataaaattcaccttgagcaaatcgaatattagaaatgttggagaattcatttttagattcatttatatatgcttcaccgagtacttccgatgcaggagtagaagtttcttctgttaaaaatgttttatagtaaactttttgaataaattgattttcaatggtcatgttcgttcccccctgtataatttagaaaaatgatgtcgtatgtaaaagggtgtatgttcttttaataggtagaagttgcattatatagaccaaactatgtttttgctagatatatcatttttcttgagagttaaaccgttgcgaaaagtaactttcctttattgtaacaaaaaaacacgcatatgaatttttattttttatcgggttatttgcgggcagtaagaatctaatctcaaaattgttgaatgtaagtaagttatgtgggagtcgggatgtctatagaagcaagattggcataggttaataattagtagaggataaacaaaactcccactgattaaagtttcactttatctctgttaaaggaaagaatagaagtagagttcattataaaaacaatgtatagtgaatatgtataccatgtttgccttaaagatagaaagggtacaatgtggaataacgatcgtgcataggatgtgtcttccgaatggaacaacatattggcgagttaatcgcgcattatggctattttggaattgttatagctttggctggtgggattgtcggattaccgataccagacgagtttttattgacctttgttggttataatgtttcaaaaggagttatgtcaggaactgctgcttttttaagtgggatggctggtgcgatgttagggatcacgttaagctacatattaggtttaaaacttgggctccctgttttaaagaaatatgggccgaaaattagaattaaagaacatcacattgaaaaaacacatattttatttgaaaaatatgggccatttcttttaatgattggttattttataccgggagtacgtcatttaacggcatattttgctggagtatcaaatttgacattttggcgtttttgtttgtacgcttatggtggtgcgcttatttggataagtgtttttattgggcttggctggaagttaggcgagaagtggcgcttcgttgagtatagtttacatcattatggaatatggattttattaatttcagcagttgttacatgtgttgtatggttgtacataaagaaaaagaaaaaccgctaatagcggttttttttagctgaaagcaataaataatacaccagctgtaataaagactacaccaacaccggtcataaagtttaacttttcaccgaggataatcatagcgagaatgatagaaaatacgacgcttaatttatcgacaggagctacttgtgaaacctttcctgttttgagggcaagaaaataaaatagccatgacgaagcacctgcaaccccacttaatgtgataaatagcagtgcttttttatttagcagtacgtcgccgatattttgaaatttaccttgtatgataataacgcctatcataaataatgccataataatagatcgaattgttgttgcaacgtttgcatcgattccgtctaaaccaaactttccaaaaatagatacaagggcagcagcaattgctgataatagtgcaaataagagccacgaactcatagtaaaattcctccaatcttacagtattatacatgaaaatgattctcatgtataaagttgaagcaattgagctttataggaagtgcgacttcaacttaacttcttgctccacctgaattttaaggtgggagttttactgcctgcaaatagtgggctaaataacgaaataatccccaccttatatttttaataaggtggggattattatactactctgcaatttcctcatataaaaagtacgttacattataaatatgttctacttcatcgtctgtcataaacagtaattcgtcacgctcaatcccttttttcttttcaataaactcaatcatgtttttgcgttcttctctcttcatcaattttatttctcctctcaatctgttttaatacagtttatttaagttactgctattatataacagaatctttagaaagttccacctattttattgttttttcaaaaagaacttttcgacaaaacaagcccacctaaggaggggcttgttttattttatagtcgtaaaaactcaggctccgtcgtaccggcaccatcaatgtaataaattgtgtcgggattgatttttatcaatacgtaattagggtcttcaggaccgagtaaccaacgttttaagctattattccaaaacttgttttttaatgttgagtcttcctcgattgaagctaacccttcaacttcaatataatcttcatctaatttttttccttcacgtccaagtagtacatgtacatttggatttttttcgatatctgttatcttttttgattttcgatctgttgcaacatatagtacaaaatcttcatggaaaaacatcataaaggcgctatgaggtttctcgttacgtactgtagataatacaccagtacgttgtccttgaataatagttgcaattttctcttttaagtgcatattctttacctcttttcctaatttatattttctctgtttaaacaagataatttaaatatctttcatactgttttctttaagtcgattttttaaacgtaatcgtgatgaaatcggacaagttaggagaagaataataataatattgaggagaaatacatacgatggaaggatgaaaagcatgtttaataaaatatttcttatagtagcacttataggtgtaccactatctgtacttggcaaaacacttcattggccagaaacaattatgttcgctgtgtattgtattacgattatcgcattagctggttttatggggagagcaacagagagtttagcaattgtttctggtcctagaataggcggattattaaatgctactttcggtaatgctgttgaacttatcatttcaatttttgcacttcaagcagggttaattgaagtggtgttagcttctttaaccggttctgtacttggaaatttattattggtaggagggttatctttctttgttggaggtcttaaatacaaaagacaaagttttaatgtatatgatgcaaggcataattcagctttattaatatttgctgttgttgtggcctttgttattccagagatcttttcaatgaagatggacgctggcaagacgtatcaattaagtataggtgtttctattattatgattatcatgtaccttgctgcattactatttaagttagttacgcaccgtggtgtatatcaacataaaagtgacgaagtagcgcatgaagaagagcaagagtggtcaaaagggaaggcgctccttattttagcgatagcaacactggcagtagcttatgtgtcagaggcactcgtacatacttttgaaactgttgcaaagtcatttggttggtcagagttatttataggggttattatcgttgcgattgttgggaatgcagcggaacatgcgtctgcaattattatggcttataaaaataaagtaaatattgcagtcgaaattgcaataggctctacattacaaatcgccatgtttgttgctcctgtattagtattgctatctatgttcttcgcgcaaaggatgcctttagtatttactataccagaacttgtgtctatgattacagccgttttcttaacgattgcgatttcaaatgatggagatacaaactggtttgaaggtggcactttactagcggcgtatgtcattatgggaattggtttttatttattatgaaaaataggcataacaattgcgctcagagaaaacaataaacgaagtagtatatatacctacataggaaggagccagacaggtgaaacgagtatacagcatatgtctttcaactatggtctcgtttattttattatttcctaacatgagttttgcaaagacaacagtaggaacaaaaatgccttcatctgttttaaatatttcaaaagacaatacatttccaaatgatgcgcaagatttgccacgtttacaaccaagtaaatttgctcaagagctattgaaaacggctaatattaaaattgaaaatccagacttaattcggatgtttaatgaaacgacaatttcaaatgcgccgcttgcagtagggtatcgggcaaaaatttatttaggtcaatgggctttacattatgaatcagtagacacatcgattaattgggaatataaacaagtgaatcgaaatgtgtatgataatcgcggaggagaccgtttatatccacttcgctataagcaagaaacacaaaagacggttgaaggcgatttaacagcagatatgaaagatgctgcagatgtgaaaaaaatgatgcttctcaaagcacttgaaaaagtacaattgccgctttcatttaaaacgactattggttatggtacagggcatgagcgtgtgtataatattagtccgagtcaacttggatatttatatgcttatacaccagcagtaaatgaaaaaggaaaagtaacatttggagaagtataccttgtattaaaaggaaatcaaaaaaggcttgttgtaaaaaatattacttctcaaggaatcggtgctgctatcccaattcatgattatttgtattttaaattcatttcttcttcccactcgcaataacatgaaaaaacgtcagcttataagctgacgtttttttataatgtaatatttgctgtttttgataagaaatcttctgtcggatagtagctgttttttacaagaacatttggtccaagacattttactgcaggacagtgacagcttaatgattttgctgtttttgaagcgctccatttttcatacgcttcttgtaatgtgtttgtttgtatgtttcctagaagtggaacatcaccaaaatcagtaacgataatattgccatcaaaaatatttacatttaagcgtgaacgaccatctggatcgttacgaacagttacatttttgctctcttgtaactttttaaatgtggcaatgtctcgctcgtcatcgctacaagcatagaaaggtaaagttccaaataacatccatacattttcatcgcgaatttctagtaaatgctcaatcgcatcacgaatttcagcttttgttaaaatctctagattactcgcgaagtcacttggatacattggatgaacttcatgacgtttacagcccatctcttcgacgatttggcggtgaatatgttcaatatgtggtagagttcttttgtttagcattgtttcggcagatacaagtacacctgcatctgatagagccttactatttgtaatcattctttcgaataattttgcacgttgttcgtaagtaggtttacgctccatcattgcaaatccgccttcaacgaagtcatcaattgttccccagttatgagagatatgcaatacgtctaaataaggaataatctgttcgtaacgtgctaaatctatagttaagttagagttgatttgagtgcgaacgcctcgttcatgggcatattttaagagtggtgttacatagttgtcgacggatttttttgaaagcataggttcgccgccagtaatacttaaagaacgtaaatgaggaatctcatctaatcgttttaataaaagatccatcggaagcggattcgggtctttcggctgtaacgtgtaaccaacagcgcaatgctcacagcgcatattgcataacgtcgtcgttgtaaactcaacatttgttaatagtagtttgccgtactcttcaaggtccatatacgcttcccatggatcgtaagaaggagtaatcggcttcattttttgtgatatcatcatatgaaatactcctttgactattgaaataacaatttgtccattctctataatagaagaatatgtgctttttataaagtgaaactttttagcatgaaaagagagagggcttacattatagtggatgactgtgacaaaattgatgaaatttcatgcccatagcaatcgtttttgcggtataataaaagcaactcgaattaaaaggagagtgccttcatgggaaaagcaattcaagataaagatacacaattagtatatttaaaagaacgtttaaatatgttcattgaagtaattgatacaattgaacccgaagaagtagaattagaagatgtagatcgtcttcttgcaatgttagatgaattagaattaaaatgtgagcaatttaaaaaagacgaataatatattaaaaaggctaccaattccaatttggtagcctttttctgttcgggtaatagaaggacgatagaaaaagaggtataatcaagttgtgaaaaatttcatttatgctctaatagcgtgaaataaatagctaaagagcataacaattgaattttcagctcataacgttttggtagcgttcacaattgagggggaagtaacaatggaaaagcttcaagaaagcatgtatcaactaattgttgaaacgtcaacgaacttaccgaaagatgttcgtcgtgcgattcaacaagcgaaagagcgagaaaatgcagggactcgttctgcgatggcacttggcacaattacaaataatattaaaatggctgatgataacatctcgccgatttgccaagatacagggatgccaacgtttaaaatttatacaccagttggtgtgaatcaattaaagttgaaggaagctatctataatgcgcttgagcgggcgacaaaagatggtaaacttcgtcccaattctgttgattctctttttggagataatagtggaaataatttaggaccaggtacgccggtgattaagtttgaacaatgggaaaaagattatattgatgcacgtttaatcctaaaaggtggtggctgtgagaataaaaatattcaatatagcttaccgtgtgaactagaaggacttggacgagctggccgtgatttagaagggattcgtaaatgccttcttcatgcagtatatcaagcacaagggcaaggatgtagcgctggtgtaattggtgttggtatcgggggagaccgcacatcaggttatgaattagcaaaaaatcaattattccgtacattagatgatgtcaatccagtaccagagttacaacatcttgaagagtacgtattagaaaatgcgaacaagcttggcattggtacgatgggatttggcggagaaacaactttacttggttgtaaaattggcgtctataatcgtttgccagctagtttctatgtatctgttgcgtataattgctgggcatatcgtcgccttggtgtgaaaatccatcctgaaacaggagacattatggattggctatatcaagaaggggaagatacacttcagcatgaagtacaagaaaaaacagagcaacgtgagattgtattagaagcaccaattacagaagagcaaattcgtgaacttcgcgttggtgatgttgtaacaattaatggcatgatgtatacaggtcgtgacgcaatccataagcatttaatggataatgattgtccagtagatttaaatggacaaattatttaccactgtggtccagttgttgtgaaagatgacaatgacaattggcaaattaaagcggcaggtccaacgacaagtattcgtgaagaaccgtaccaaggcgatattatgaagaaattcggtattcgcgctgtcattggaaaaggcggtatgggtgcgaaaacattagcggctttagaagaacatggcggtgtatatttaaacgcaatcggtggtgcagcgcaatattatgctgaatgtattaaagaagtgaaagatgttgatttcttacaatttggtattccagaagcaatgtggcatttacgtatcgacggttttaaagcagttgtaacgatggactctcatggtaatagcttacatgcagatgttgataaaacatcacttgaaaaattagctagctttaaagagccagtatttaagtaaataaaaaatgcatctcgaatgattcgagatgcatttttttggtatatatagaaaaacatgttcagcatgaaagaatgcgttgcaacagaaactacaagtacgattatatatggaaaggagactatttatgaaatataaatggttatatatcggtctcattttttcaattatgatggcacttgttccagtttcagcactggcttatacaaatactccacataactggggaatcccgcgtcctaaaaatgaaacagtaccagatgcaggaaagttatatacagatttactacaaaaaaatggcgggttttatttaggagatacgaagaaaaaagatatttatttaacatttgataatggatatgagaatggatacacagggaaaatattagatgtattaaaagagaaaaaagtaccagcaactttctttgtaacggggcattacattaaaacacaaaaagatttattgttaagaatgaaggatgaaggacacattattggaaaccattcttggagtcatcctgattttacagcggtaaatgatgagaaacttcgtgaagaattaacgagtgtaacggaagaaattaaaaaagtaactgggcaaaaagaagtgaaatatgtacgtcctccgcgcggtgtatttagtgaaagaacgttagctcttacgaaagaaatgggctattataatgtattttggtcacttgcatttttggattggaaagtggatcagcaaagaggatggcaatatgcgcataataatgttatgacgatgattcatccaggatctattttattacttcatgcaatatcaaaagataatgcagaagcacttgcaaaaatcattgatgatttgcgcgagaaagggtatcattttaaaagtctagatgacttagtaaaaggcaatcaaccgtaagcatgtatgcttacggttttctcatgctataatgatgtgtaaaaaggatggggaaacgtatgtggagcgagcatgttacgttagagtatccgtatcattttgaagaagtattaaaacgtttatcttttgatcctcttaacgtcattcaattagatgagaaagttatttatatcccgctttgtatcgacgaggaacaggttgttgttcgcttacaagggattggtactgttcaaaatccacagttttggatttctagtcagacaggagatccagagaaagtcatgaaacgaatgagagccatttttcattggaatgaaccgtttcaagatatacaaaatcattttttaaacacatcattacgtccactatttgaaacatatgcttatactccaattattttagaatttgattattttgcttgtctgcttcgctgtatcattcaccaacaaataaatttgaaatttgctactgtgttaacagaacaatttgtgaaacggtatggaacagagaagaacggtgtattctttttccccactccggaaatagtagcaaatatttcaatagaagaattgagagagcagaagtttagtcagcgaaaggctgaatatatagtaggattaggtcgaagtattgtcagtggtacattaaatttagcgagtatagaaaatgggacggaagaagacatttcagcacaattgttgccaattaggggaattggtgcatggacagtgcaaaactttttaatgtttgggcttggacggaaaaatatgttcccgaaagcggacattgggattcagcgtgcagtgcaaggtatatttcaattagatgataaacctgatgatgcatttttagaaaaattgaaacaagagtgtgaaccatactgcagttatgcagcgttatatttatggaaaagtatagagtagaggtgtaataatgatacaaaagcaacatgagagtaagttggaagttggtcaaacgtttcctgtgacaattaaacgtcttgggattaacggagaaggcgttggttattttaagagacaagttgttttcattccaggggcattaccaggagaagaagttgttgcagaaacaacgaaaattcagcgtggcttcgctgaagcgaaagtgaaaaaagttcgtaaagcttcaccgcatcgtgtgaaagcaccgtgtccagtatatgaggagtgtggcggttgtcagctgcaacatttagattataaagaacaattgaatcaaaagcgtgatatcgttgtacaagcatttgagaagtacatgaaaaatagtatggaagagaaaattcgtccaacgcttggcatggaaaatccatggcattatcgtaataagagtcaattacaagtggggcgtaaagacgaaaaggttattacagggctatataaacaaaactcacatcagttaattgatatcgctcactgtatgattcaacataaagcaacgaatgaagcgacaaaagttgtaagacgtattttagaaaaattaaatgtttctatttacaatgagaaaaaacaaaaaggtttagtacgcacaattgtaacacgtactgcagttcaaacaggtgaagtacaagttacacttattacaacaaaagaagaattaccaaataaagaacaatttattgcagaagtacaaaaacagatgccagcggttaaatcaattatgcaaaatgtaaactggcgtaaaacatctgttatttttggcgacaaaacatttaaattagctggaaaagaagtaattcaagaaacacttggtgatttatcatttgaattatcagcacgtgcgttcttccagttgaatccagagcaaaccgttgttttatataatgaagcaaaaaaagccgctgcgttaacaggcgatgagaaaattgtagatgcgtattgtggcgttggtacaatcggtctttggcttgcaaatgatgcagcggaagtacgtggtatggatgtaattccagaagcgattgcagatgcaagaaaaaatgcgaagcgtcacggatttacaaatacgaaatatgaagcaggtaaagctgaacaatggttaccgaaatgggtaaaagaaggatggcgtccagatgtaattgttgtcgatccaccacgtacaggttgcgatgataaattactggaaacaattttaaaggtgaagccgaaacaagttgtgtatgtgtcttgtaatccttcttcattagcgcgtgatgtacaagcattaatgaagagctatgaagtggagtatgtgcaaccagttgatatgttcccgcatacagctcacgtagaaaatgtagtgaagcttgttagaaagtaaagtttattaatattccctcatggtatgagggaatattttctatgaaggagaatattatgcataattataaattaacaattcagtacgatggcgcacgttttaaaggatggcaacgtctcggtaataacgataatacaattcaaggaaaaatcgaaagtgtcatatctgaaatggtcggaaaagaaattgaaattattggttgtagtagaacagacgctggtgtacatgctttgaatcaagttgctaactttcaaagtgatgagaagttagtggaacataaagtgaaaaaatatttaaatcaatatttacctaatgatattagcattacgaatgtggaagaagtacatgatcgtttccatgctcgttacaattctaaagcaaaaacatatctgtataaaatttggaatgaagagcatacaaatccatttatgcgtaaatacagcatgcatgtgaataaaaaattaaatgtgaaaagcatgaaagcagctgcgaaacatttagttggttcacatgactttactgctttttcaaatgcgaaatcaaagaaaaaatctatggttcgagaagtatatacacttgatgtgatggaagaggcagggtttgtacaaattagagtaagtggtaacggcttccttcataatatggtaagaaaaattgtcggggcattaattgaagttggattaggacaattagacgctgaagcaattccaaacattttagaggaaaagcagcgcaatcaaattaattgtcttgctgaggcaagtgggttgtatttagagaatgttgagttttaatggcaaataaaaaaatcgggctaagtagctcgattttttttgtattacgaagatttctcgttttttatacgtagcttcaaattccaaaaagcagcaagcataatagctgcaaaggagccactaattgttgctaatagctttgcataaggataggcgtttatatcaattagtaacatcatacatacaatggtagggaagaaggctaagtattgtaataactttaatttgttatcattactcatatatatcgctcctttctagtatgttatatgtttattgtagcatattttaccaagtgtttatttgtatgttaaagcagatttatgctgcattaacaagcaataaaagtcgaattgattagggctagcaatccactcatccaagtttcatttcatatgtgtaaatgcagttttttaattcgatattgtaagttttgtctacttaatcctaaaaattttgcagcttgtgagatattcccgtgatactcttttagaatttgattgatgtagtttttttccatttcttctattgtgtgctttaacgttttaggcgtatcagtatcgttattagttaagaaaggttgcatattgaattctttttttattcgttcgcgaaagcgagtgggaagatgaaacgctgtaatgatgttttcatcttcaactaaattcattgaaccttcaatgatatgttccaattctcttacgtttccaggccaatcatatgcatataaaaactctcttacatgcacatctacatctgttacactaagtccgaattgaatattgtatttttcgataaagtgctgaacaagagccggaatatcttcttttcgttcacgtaaaggcggaagacataaagtaacgacgcttaatcgataatataagtcttctcgtaatcgattgtgtgtaatagcttcaagaggatcttcattaatagttgctataatacgaacgtcaatttctttttcttgtgtgcctccgattcttcttattgttttttcttgtatagctcgcagtaacttcgcttgaagtgctggacttaatgaattaatctcatctaataacaaagttcctccgttcgcttcttcgaataagcctgatttatctattgctcctgtaaaggcacctcgatttgtgccaaatagtaggctttccattaaggtatcaggtatagcggcacagttttgtgaaataaagggttttgttgaacgctgactttcattatggatgctttgtgcaaatagttctttaccagtgcctgtttctcctactagaagtatggaggaagatgtacgaattactctttttccttctgtaatgattgattgaatggctttagaatcaccaattatgtgatcaaaggtaaatttggtgctttgttttcgagaaggacccatttttatcgtctgctttaagtgactaatttcttttgatatttcaatagcgcctttaatttttccattttctattatagggaaagtatcgttaatcgttgtaatttcttgtcctttattgttaaaatacgtttgttttatatttttgtttgtttttcctaattttaatgcctctataagagtactatttttattttcttcaaatgcaaatacttctaaaggacttttatataatacatctgagcgttccattgattcaatttccatcattttgcggttgtagataatcgttttactttcctcattaataatatgaatcccgatatcgagctcattgagtaaagtttcatatagcatattcatttcaacgatctgttttaaattaatttcttctgtacgcatagattatcttctcctcatttcaccctatgaagactgactttttataattttattaaaattcttataaaatcgcaaaatttttttgctatttttctcttaaaacttttcaaatgatagaaaaattttgcggttgtgcacacttttttgtgtgaaactctcatttaatatatgaatcagagacttggtacgtattttgcataaataatattcgaaatctctagaggggagaatatgaatttttacaggatatacaacgttttggtgtcaattaataagagggaggaatttataaagtgaagacagttatagaaggtgtgtatagtccttgttatggaaaagtagagaagctatttgttgcggaaagttcatacgtatacgagtgggagaaattagcgttaattgaaacaatagataaacagaaagtagaaattaaggtaggaatcagtgggtatatcgaatcattagaagtagtagaaggacaagccattgctgataaaaagttattaataacagtgagggatgatcttttaataacaggtagtgattaataagtgctatgtatttcactcttttcaataatcatttttattatgaatgattttaaaaacgcttacatgaaatgggtttccaaagggaaaaggggggatttatatgatggatcaaaaccaaggtttaaaacgtgaattgaaaagcaggcacatatttatgattgcacttggaggagttattggtaccggtctttttttaggatctggatatacaattcatgaagctgggcctgggggagcaattgtagcgtatcttgttggagggtttgttatgtatttaacgatgctctgtcttggagagttagctgttgcgatgcccgacgcaggatcttatcaaacgtatgcaacgaagcacatttcccctgcagcgggttatgtagtcggatggatgtcgtggttaaactggtctgctacgataggtattgaactgattgcagttagtattttaatgaaacgatggtttcctgatgtaccgtcatggatttggtgtgtagcgtttgcggtgcttctctttgctatcaatgcattatcttcaagaagttttgcagaagttgaattttggtttgcaagtattaaagtaattacaatcattgcatttattattttgggcggggcagcaatgtttggttttctagatatgaaaggaaatgaaccagcaccaatgttctctagttttactgattatggtggattgtttccaaatggattatccgctattttaattacgatgattgctgttaatttttctttccaaggaacagaactagtcggtattgcagcaggtgagagtgaaaatccagaaaaaacaatcccaaaggcaattaataatacagtttggcgtatactcgtgttctttgtattatctattttcattcttgcaggattattcccatggcagcaagcaggagtgatagaaagtccattcgtagttgtatttgataaaattggtattccttatgcagctgatattataaacttcgttattattacagcagtactatccgttgcgaattcaggattatatgcaacttctcgtatgctatggtctatgtctaatcaaggaatgattagtccgatttttggtaagttatctaaaaatggtgttcctatttatgcattgattgtaagcacgattgtaggctgtctttcattactatcaggtatttatgcggaagatacagtttatttatggctactttctattgccggatttggggcgatattagtttgggcatctattgctttatctaacttattagctagaagggcatatgttaagcagggcggagatgtgaaggacttgaaatttaaaacaccgctatatccattcgtaccacttctggcattagcattaaatataacagttatagttgctatggcttttatcccagagcaaagaatggcgttatattgtggaattccatttatgattgtttgtttactgttttaccgtgcgacaagaaataaggtacgtaaagtagagcatattgaaaagatcaatacaacaaaagtagaaagtttataatattgagtaatttggagactgtaaaattgtaaacagtctctttttttgtgaaaataaagctggaaacatactatgtatgcaaaggggaattagcgatgaatcaagaagtttcacagctattagaacagattgatttacgaaaagatgagttactagagcttacaaaaaccttaattcgttttgaaacactagcaccgccggcgagaaacacaaatgaggcgcaagaatttgttgcagagtttttaagaaaacgaaattttagtgttgataaatgggatgtatatccgaatgatccgaacgttgttggggtgaaaaaagggatagaaagtgacacacataaaagtcttattattaatggacatatggatgtagctgaagtgacagcagatgaggcgtgggaaatgaatccgtttgagccatttataaaagatggttggttagttggacgtggtgcggcagatatgaaagggggattggctggggcactatttgctattcagcttttacaagaagctggcattgaattacctggagatgtaatctttcaatccgtaattggggaagaagttggagaagctggcacgcttcaatgctgcaggcgaggttatgatgctgattttgcagtcgtagtggatacgagtgatttacatatgcaaggacagggcggcgtaattactggatggattactgtgaaaagcccgcaaacgtttcatgatgcaacacgtaggcaaatgatccatgcagggggacgtttattcggagcgagtgcgattgaaaaaatgatgaaaattgtgcaaagtttacaagaattagagcgccactgggcagtcatgaaaacatatgaaggctatccatctggaacaacaacaattaatccagctgttattgaggggggaaggcatgcggcgtttattgcggatgagtgccagttatggataacagtgcacttctatccgaacgaaacacatgaacaaataataaaagaaattgaagagtatattggaaaggtagcagctgccgatccatggttaagtgaaaatccgccacaatttaagtggggcggagaatcaatgattgtagatcgtggtgaaattttcccttcattagaagtagatagggaacatgcagctgtaaaaaaacttagctcagtacacgagtctattttatcaaaaaatgcaattttagatatgtctgcaacggtaactgatggcggttggtttagtgagtttcacattccagcgattatatatggaccaggtacattagaagaagcacattctgtaaatgagaaagttgaagttgaacagttaattgaatttacaaaagtgataacagcatttatatatgaatggtgccacacgaaaaaatagatttgtatagtaaaatcgtacgagtatgtatacttgtacgattttttattgaactatttcagagttgaatataaacaactgaaatagttctttattttgctatgtctttcgttttatttcaagtaatttctcttttgctaattcaacggcgatcgcatcatctaaatagccaattggaaagagatagtcgggaataatatctgtcgataaaatgaaataaagtaatgcgctcccaagaactgcacgttcttcttttgaaatggtttcattgcaaaattgttgatacatatctgttaattgttcaataaaaggacctgcactatcaatttgctctaatttgcttgcgaaactgttatgaatacgtttttcaccttctgttgtctgggcatagcgttcgtaattttcgagttcttgttttacgcgagttgtagtgtaatcgaaatcgaataagttagaggattgcagcgtttgctgaatggtatcaagagatgtgtacatatctgttttttctttatttatgtgaggagaatcagggtacatttcatcaaataacaattggggtggaacttgaagacattctgcaaatttttgtagatgtttttgttttggcggttgtttgccattaataattcttgagactgttgcaggatcaatatttgtaagtattcctagttggcgcatagataaggcgcgttcttttaaaagtttttttattaatttgccaagccgatcattcgggttttcattagccatagtgtaggcactccttttttagtgttgaaaaaatattgagcatttattacaagtatatgaaacagacaggcacagttgctcaacattttcataatatgcattgaaaagtgagaaaaaggggtgactatttatgagtacggtaggcttattttcaatttttttaatcgggatcgcttctaatttagataatgcaggtgttggaattgcatatggcattcgtaaaattcgtatttcgtggtttaacaattttatcattgcattctttggatttttatttactttactagctggattttttggaaactggattgcgttatttatttcagagtttacagcaaatctgattggagcaatctttttagggataatcggtgtgtttattttatgtcagcctttcttgggccaaaaaaatactgcaggttctaaagatgataatgtacttatgggaattttacgtgatccggaaaaagcagattttgatggttctaaaacaattagtttctcagaagcaattgttttaggagttgcgttgtctattaataatattgcaggtggatttgatgcaggggtaacaaatttaaatctttggcttacagcgactatttctggggtgtttagttttatttgtattagtggttttgcgtatgtaggaaaacgatttttagcagaatacttagggaaatgggcgacagttatcgcaggagtgttattaattcttattgggatcgatcagttgttgtaaggagagtagaaaacaaggttcgagtatttccttggaaatacagcaagagattgcatatatcgacgtacttttctccatactaatacggatttcttttaagaaagggggatttgtatgggacgcgggaaagcatttgatcataagaaaaaagggcatgatcatcaaccacctaaaggtgcgttcattcataaagatgtaaatgaacatactttggaagaggaagagctaccagtaaatattgaggcgtataaaaatagtttaaaaaaacattaaaagcacctacataggtgcttttttaccgtatatcttcaattaattgttcggattcttcatgcatactgtactcacttaatacttgaatgcaaagccactttaattcttcaatcgtatgctcaagttcttcaggaagcacatgataaatgtcttcaagtcccatcccgaaatgaataagttcaagtacttgatcatcgatgttccgatccattaataattcaagtacttctaaattgaatatgtatcggtgagcttcgtcgagtgaaacaacttttaacttcaagctttctacaatactcaatataaaaagaaggattgttttttcaagaacaggttgttttcccatttgaaatattagtttcatctttcacacctccacatatagcgctaggttgtactatattattcaggaggggggaacaaatatgcatgatatagagaaactttcagcactgtttttgtaagaggattgataactgacaaaagtgaggttttggcgaaataaaaaatcctgctagtatagcaggataactcgcgattaaaaaatgctccaaccttcttgagcagaaagaagttcaagaattttaaaaccggcaatactatttccgtttgcatctaaagctggtccgaaaataccgattcccatgtctccttttacgcagccaaaaataccaccggctacaccactttttgcaggaataccaacacgaattgcaaattcaccagattcgttatacataccacatgtgaccataaatgttttgcaaatttttgtaatatgtttagggatgatttgttttttcttatatggatcatatccatccattgcaaaaattaagccgatacgtgctaaatcgatgcagtttacttcaactgcgcattgacgagtatataaatccataagttcttcaatatcacaatcgataattccgttttgtttcatataataacaaagtgaacggtttaggtaagctgtctctagttctgaatcggcaactttagaggaataattaatagtaggattatctgttatttcacgtacaaaatgaagaatacgttccattttttcctcgttatcttttcctgctaacatgcttgtaatagctaaagctcctgcatttatcattggattaaggggtttggacggacttgtcgtttctaacttaataatagaattaaatgggtcacccgttggttccattccaactttagaaaatacatattcttcaccacggtctaaaagggcaagggcaagtgtaattactttggaaatactttgaagagtaaatagtgtttgtgagttacctgcatggatatattctgtttctttatggaaaatggcaatccctaaatcgtctggatttgcatttcctagttcggggatataagtagcaagttttccttttttcgtatatggttttacttgttctaacaactgttgtaagttgtttgtttcaatgcactgcatagtaccaacgctcctattttgaattaactaagtttacttttcccgatatgctcggaaataaataataacatgaaaaagtggaatgataaaacgaaagttcaatgtgctataataggtctttcgtttcgagtattctgtattttaaaaaggagaattttccttttatataacagtttggaaataggagatttatccataaaaagttcagaaataaaaactacacatctatacaactatatgttattatggttatgtaatagaaagcgttttctaaagcgtacttataatgataacgatttcataaatttgattagggggaattaaaatgttgcagtttttacaacgtattggtaaagctttaatgcttccgattgcagtactaccagcagcaggattattgcttcgtttagggcaaccagatgtatttgatattcctgttatggcacaggccggcgcagcagtttttgataacttagcacttatttttgcaattggtattgcaatcggtctttcagtggatggtagtggtgcagcaggtcttgcaggtgcaattggttatcttgttatgaaaaatagtattgatgcacttagcaaagggtattcaactgctgaattacaaggtaaattaggtaaagtccaagatttaataggtaatagcgcaaatgtagatccatctaagcttgcggatacaatgacacaagtatctaaggctgctgaattatcgactaaagtagatatgaaagtcttaggtggtattattgttggtgttatagcaggacttctttataataaattccataagattaaacttccagaatggttaggtttctttgctggaaaacgtttcgttccaattgttacatcagttgtgatgctgatattaggaattctatttgcacaaatttggccaacaattcaaaatggtattgatgcattagctcatggaattgttaatttaggtgcaattggttcaggactatttggtttattaaaccgtttattaatcccaattggtttacaccacgtaatgaacacatacttctggtttgtatttggggactttacaaatgcagcaggtaatgttgttaatggtgatattgctcgtttccttgcaggtgacaaaacagcaggtatgtttatgactggtttcttcccagttatgatgttcggtttaccagcagcatgtttcgcaatgattgcagctgctaaaccagaaaagcgtaaagcagttactggtatgttagctggtctagcattaacttcattcttaactggtattacagagcctattgaattctcattcatgttcttatcaccagtattatatggtattcatgctgtattaacaggtctttctttattcattacaacatcgcttggcattcatgatggtttctcatttagtgccggtgcaatcgattacgctttaaacttcggtattgcaacaaaaccagtcttactagcaggtattggtttaatttacgcagcaatttatttcatagtattctacttcttaattaagaagttcgatttaaaaactcctggtcgtgaagatgacgatgagttagttgaagatggtgatgcaccagttgcaggttcaattggtgaaacttacgtagcagctttaggcggaaaagaaaacttaacagttattgataactgtgcaacacgtctacgcttacaagtaaaagatgctggtcaagtaaatgaagcagcattaaaacgtgctggtgcaaaaggtgttatgaaattaagtaatacaagtgtacaagttatcgtaggtacaaatgttgaatctgttgccgatgatatgaaaaaacacgtataaataatgagataagaggatgtccaaaaagattgataacatcaattttttagaggatatcctcttttttttgttaataatttaacgggaatcttacttttgtaaattttctttttcttttttgtacatataggttggtaatatgtgcagtgcgtgataaagtagggatgatatagaatggattatccataatctactaaaataaatctttaatagaggaattaaattattggtgagtaaggggaaaaaagcaattatggatcaggaaaaaaataatgcgaatgggaaagtacgtcggccgattgtatacatcaaaagaacaatcattctcgtcttactattatcacttgtatatttcatgtatacaaaaattgttgcgcataataagaaagaagaaactttaaaagcggcagcagaaatgaagaaacaagaagagctaaaaaagaaagaagaaaaaaagaaacaagaagtacagaagcaaaaacaaaaagagcaggaagaacaagtgaagcaagcgcaagttgcggaacagcctgctgaaggaccaactcaagaaattaatgaaaacgctcaattggaccagtatttaaaaaacgcaggctttagcgggacagctgttattgtgaagaatggaaaagttcttttgaataaaggatacggtatggcaaataaagagcagcaagtaccgaataattcagagacgactttttatattggttctatttcaaaggcgtttgtagcaactgctattatgcagttgaaagatcagaataaattacaagtagaagatactgttgcaaagtatattccaaatttcccacaaggtaatagtattcagctaaaacatctattaacacatacatcagggattcccgaatatgagcagggaaaagaagatatttctcatgaagaactgataaagcggataggaaatcaaaagcgtattggtggtccaggagagaaatggaagtattccgattcgaactactccgtacttgcatacattgccgagaaggtaagtggacagtcgctcgaagaatatattaaacaacatatttttgctactgcgggtatgaaacattctggttttggcacagcgttagaacaaacaagattcccatcaacgggttataaaatagtaaataataatatgacaacacctaatattccgagcatgtcacaactatatggttgtggtgatatatatacgagtgcacatgatttatatttatttaacgaagcgttatactctggaaagttaatttcaaaagcaagttacgatcaaatgtttacagccgtgaaaaaggattacggatttggctggtacgtagacccaggaagctattcgaatcatggtgtaatgccaggttggaattgtttaaatggatttagtaaaaacggtagtgtgtacgttgttttattatctaacattcaaaacaatattaaatcatttggtaaagtgaataacgatatatatacgatgttaagaaatattgaagtgtaagaaactatccttttggatagttttttttatgccctgaaacaaatatttcttttagaaaatgtatgtcttacctatcacaaaaatatctattttgtatacattaagatgtatggatgtatttttataatttaaaaataataggaggagaagtatatgtgtctgttcagtaattattggaaaaagttatcaagattgtttaatagacaattagattattttttagataataagttattgcctgctgtggaaagacttttattttcgcaaaacttcgcgaggtttattcaaagaaattccaagcaagctacagaagaatttattaaatcaagtcaatttcaatcgattatttgtaacattttaaaagaatgtaatacatcaccttttaaagaaattgcagagcagtatttaggtaaaaacgtagaaattactgtgacagtgggacagttaacaggcgttattgtagcagttggtgatgacttcttaacattgcaagaaggaataggaacagaagttttattaccatttacaagtattatatcaattaaagaagcgtaagaaaggagacttatatatgttatttactgaagaattacgtaaccatgttggtgagttagtgcaagttgtgacagcggccgaaattgttgcaggtattctgttatctgtgacagatggagcagtaagtgttcgtacttctccttcttatggaccaccggaagatgtagttgtacgtattcctattatttcatatgttcgcttggaagggtaagagtgatacaagtatgagagtgtcagttgttattccagtgcataatgaagcaagtactttatcaaaagttttagtagaagtaagaaagctcgaaccatatgaaattatcatagtagataatggatcgacagatggtacgaaagaaatagcgctacagcataattgccgtgtaatttattatagatattcccttggtaatgatgtgggacgggcaattggtgctagagaagcaaaaggtgaaattgttttatttttagatggtgatatcgtcatgaaaagtgaagaattatacaattttattaaaggaatacagcaaggacatgagattgttttaaataatttaacatggtccgtttatttgaagatgagaccgcattatacgacggttggaaaatatatgttaaatcgttatttgaacaagaaggagtttgttgtaggatctttaattgcaataccacatgcgataagtcgtaaagtgattgaaaaactggggtggtggaatttagcagatccagcattatttcaagcgatggcgatgtctagaggagtagatatttctgatatggcttcagttgatgtcatttacacaaataaagttcgtcctgtccatacgggcgcatcacctggctctccttatccgaaagcgactagtcgtattatgggtgatcatttgcgtgctttacaatacgtaatcgaaacatacggtaatcgcggtggtttttcagaggacaatagagatagagcgtttgtaggaaagtataaaccagttttattacaaaagaaaaaagcgaaatatagtgccattatcccggtatcagaagaaaaaataactataaggtctgttatacaagaagtgaaagaagcaggtgtagatgaaattatagttgtcgcgaatggagcagatgttgagactgttaaacaggcaaagctagagaatgttattgtagttgaatttacgaaggcgcttggacataatgtagcacgagcaataggggctatgcatgctacggcagatatttgtttattcgttgatggtgattttgttattccagcaaaaaaactcactccatttttacatgctgttgaagatggaaatgacgtggtgttaaatgatttacaatgcttattagatatgtttcatccagcagatccaattagtatgggaaaatactttttgaatttggtagcgaaaagaccagatttatggaataactcactaactgctgtaccacatgccatgcataagaaggtaatagagaaaataggatatgacgcccttatcattccgccattagcacaagtgaaagctattttagaaggattctctattacaacagtagagttagtagatgttataaaaacaaatcgagtacgtccagagcaacacgaatttgtaaatgggcgtatttcagcgtttgatcgtattttcggtgatcaacttgaggcggttacgtatttattacaacgtacggatgaacgtggtggctttactgatggagatagagatagagatatcattcaacaattgagaagggaagaagagaatacaaatgaatagtagtaaagtagctattattgggttagggtatgttggccttcctttagcggtacattttgcagaaagagggcatacagtacttggattagataaagatattagaaaaatagactcaattataaaaggagaaagttatattccagatgtttcttctaaagagttacaaagtttattgacgaaaaaaaaattaacagtaaacacaccggatcaaggcattgctgattttcaaagtagtgattatgttattgtcactgtcccgactccaattaatgaacaaagagaaccagatttaagtgccctcatttcagcttcgcattatatacaacaaaaccttcaaaaaggacaaaccttcatttttgaaagctccacatatccaggcacacttgaagaagtcatcatacctattatttctcaaaatagtaacaaggtaggggaagatttctatatcggatattcccctgagagaattgatccagcaaatagtcaatattcagttcaagctattccaaaagttattagtggacaaacagaaaagtgtagacaaaaggtacaggatttatatagtaccatttttgacgaagttgtacctgttagctctccgaaagtagcagagatgtgcaagctatttgaaaatattcagcgcttagttaacatttctttagtaaatgaactaaacacactatgtgaaagtttaggcattgatttttatgaggccattgaagcggcatctacaaaaccatttgggtttactccatattggccagggccagggatagggggacactgtattccagtagaccctttatattttcaatggagaataaaaaagaatggggcaattagtcaattaattgaggcagcacatataattaatgaagaaatgccagagaaaatggtccggaaagtaaaaagtgtggtgcaatcacctgcaacggtgttaattgtagggattgcgtataaaaaagatgtaaatgatttgagagaatcaccagcgttaccgattattcaattattaagaaatcaaggatacgagatagaatatcatgatccttatatttctttcgcggaaattggagataaggtgtatcaatctgtttctttagatgaagaaaaagttaaaaaagcggattgtattttaattttaacggatcattctaatattgattggaagctttttaaaggaatggaccgagtaatagatacacgcgggattgtaaagaaggtgagtaaatgagtaagaaatgtttaattacaggtggggccggatttatcgggtcgcatttagctgaagagttgatgagaagaggttatgaggtcactgttgtggataacttttataaaggtaaaaataagtaccataaagagttaatgaaaaaaatccgtgttattccaataagtgttttagataaaaattctatttatgaattagtagatcagcatgatgtcgtgtttcatttagcagcaattttaggtgtgaaaacaacaatggaaaaaagtatagagctcatagaaacgaattttgatgggacgagaaatattttacaagcagcgttaaaaggaaagaagaaagtagtttttgcttctacttcagaagtatatggtaaggccaagccgcctttctctgaagagggagatcgattatacggggcaacttctaaaattcgttggagttatgcagtttgtaaaacgttggaagagacattatgtttaggatacgcattagaaggtttaccggtaacgattgttcgatattttaatatttatggtccaagagcgaaagatggtccgtatgcaggggtaatcccgcgatttattagtgcggctttgcaaggagaagacattctcgtatatggagatggaaagcagacacgttgttttacgtatgtgagtgatgcggtagaagcaacaattcgggcaatggatgagaaggtaaatggtgagattattaatataggttctgagaatgaacagagtataaaagaagtagcagaagtaattaaaaaattaacgaattcttcttcgaagattgtacaagtgccttttgaagaagtatatcctcatggttttgaagaaattccaaatagaagaccagatgtaacaaaattaaaaaagcttgttcaatttcaggcgaaagtaacgtgggaaaacggattgaaggaaacaattaagtggtttcgtgaacaaaacaatggctaagtcattatctgttattattcctgcatgtaatgaggtcgatacgatttcagacgttattcaatcggtaagaccattaaatccagtagaaattattgtagtagcaaacggttgtaatgatggaacagaagatgttgcagatcgtttagggtgtaaagtaatcaaacatacagagctactagggaacgatgttggacgtgcagtcggcgcaaaacatgcgataggtgatgtattactatttatagatggtgattttgctattcaaacttcaaaattaaaattattccttaatccgattttatacgatcaggcagatgtagttttaaataatttggatgcattatttttaaaaaggcaaaaacctacttctattacagtatggcgccaaatattaaatgcaatgttagagcgtgaagaattaaaaattaattctttattagatgtacctcatgcgctgacgaaagaagtcgttcaaagcatcggatatgaatgttttgttaatcctattgtggctcatttacgcctacttcaaagtaaatggagaattagtcgtcattgcgccattgacgttattacgccaaataaatttcgtccattccagcatgctgcatatggaacaaatctttcccaatctgaaaaaagaatgataggtgatcatatagaagcagtagcggcacggatattaagcagtgatgagcgcggaggatattatgatggaaataggaaaagggatagtgtctatcatactttaagttttgaagagttttatcaaggatggggcgtcacatctaatttgtataaaggaaagcaactatctgttgttattcccgtacaagatgaagagaaaacaattggaaacgttatagaagagcttcgcaaaattgaacccttcgaaattatcgttgtcgtaaatggttcgtcagataaaacgaaaaaaattgcaaaagacaaaggggcaacgacaattgtatataaagaagcactcggaaatgatgtagggcgctcacttggaacttattttgccaaaggagaaattgtgttatttatagacggcgattttattattccagcgagtgagctatatccttttgcaaaagctatagcagatggaaaggacgtcgcattaaatgatttaaatcactatttagatttaagagtaccacttcatcttgtaactgcatttaagtatgcactaaatttagcttgtgatagaaaggatttaggggtaggctcacttattgcggtacctaatgcatttagccaaaagtgtttgaaagcaattgggtataaatctttattgtcaccttgtgtagcacaagtgaaggctcttctgtctggatttgaaattgcatgtgtatatcgtgttgaggttgataagatgaaccgtattcgtcccagtgaacatttcgcaaaaataggtcaccctccagctgtacttcgaattataggtgatcatatagagggactagagcaaataatttcattaacagacaatcgtggcggattctatgatggcaatagaaaaagagatgttttatagaagtaacaaaaaagtgtacaacatgtgtacacttttttgttctgttataaaaactataacagattaggagataagagtattacagctctacaatgggtattgttcttatattacaaaataggactcgtatataaggataccaaaaaaatacaattaaggaaagggttaattttaaagacttttaaatgaagttaacactatatatatagtagtttgctcaatatttcacaaacatgtcacaactatttcgttcactttcgtaaaaaagtagtattctaagtgtgtaagctgttatataaaaaatcttagtcctgtactaatcaaaaatggaggagattaggatgactcaagtattagaaaatgttaaaaacgcatgggaaaactttaaaggtgaaaaatggaaagcagagattgatgttcgcgatttcattttaaataatgtaaacgttttcgaaggagacgaatctttcttagcagaagcaactgaagcaacgaaacaactttgggatcaagtaatggatttaacaacgaaagaacgtgaaaacggtggcgttcttgatatggatacaaaaattgtttcttctattacatcacatgcccctggatacttaaataaagatattgaaaaagtagtcggtttccaaactgataaaccatttaaacgttctttacaaccatatggtggtattcgtatggcagaacaagcttgtgaatcttatggatacgaaatggataaagaacttagtcgtatttttagagattggagaaaaactcataaccaaggtgtatttgatgcatacacaccagaaatgagaaatgcacgtaaatcaggtgttattacgggtcttccagatgcatacggacgtggacgtattatcggtgactatcgccgagtagcgttatatggtattgatcatttaattgaagcgaaaaaagctgatttaaatttaactggcggtgtaatgagcgaagatacaatgcgtttacgcgaagagttatctgagcaaatgcgtgcacttcaagagttaaaagaaatggccgcttctcatggcttcgatatttctaagccagcaacaaacacgcaagaagcattccaatggttatacttcgcataccttgcagcgattaaagagcaaaacggggctgcaatgagtcttgggcgtacttctacattcttagatatttacattgaaagagatttagcaaatggtactttaacagaagaagaagtacaagaaattgtagatcacttcattatgaaattacgtcttgtgaaattcgcaagaacacctgattataatgaattattctctggtgacccaacttgggtaactgaatctatcggtggtatggcattagatggtcgtccattagtaacaaagaactcattccgtttcttgcatacattagataatttaggaccagctccagaaccaaacttaactgttctttggtctaaacaattaccagagaactttaaaaactactgtgcgaaaatgtctattaaaacatcagcaattcaatatgaaaatgatgacattatgcgccctgaatacggcgatgattacggtattgcatgttgcgtatctgcaatgagaatcggtaaacaaatgcagttcttcggagctcgtgcaaacttagcgaaagcattattatatgcgattaacggtggtaaagatgaaaaatctaaagcacaagttggtcctgagtacgcaccaattacttctgaagtattaaattatgaagaagttatgcataagtttgatatgacaatggaatggttggcgggtctatatttaaacacattaaatgttatccattacatgcatgataaatatagctatgaacgtattgaaatggcacttcatgatacaaacgttcttcgtacaatggcaacaggtattgctggtctatctgtagtagcagattcattaagtgcaattaaatacgcaaaagtaaaaccaattcgtgatgaaaatggtattgcagttgacttcgagattgaaggagatttccctaaatacggtaacaatgatgatcgtgtagatgagattgctgtaaatcttgtaaaaacatttatgaataaacttcgtaaacataaaacatacagaaattctgttcatacaatgtcaatcttaacaatcacatctaacgttgtatacggtaagaaaactggtaatactccagatggccgccgtactggagaaccatttgcaccaggtgcgaacccaatgcatggacgtgatacaaaaggtgcattagcttcattattatctgtggctaaattaccatatgaagatgcacaagatggtatttctaatacattctctattattccgaaagcacttggtaaagaagatgatgtacaagtacgtaacttagtatcaatgcttgatggctatgcagtaaaagaaggccaccacttaaatattaacgtatttaaccgtgaaacattaatggatgcaatggaacatcctgagaaatatccacaattaacaattcgcgtatctggttacgctgtaaactttattaaattaactcgtgaacaacaaattgatgtaattaaccgtacaatgcatgaaagcatgtaaatgaaaaaagtgtcccttcgctcttaatatatagcgaagggaggctgtttcaataaaggaggaagtaacatggtaaaaggaagaatacattctgtagagtcttgtggtactgttgatggcccagggattcgttatgtcatatttacacaagggtgtttattacgttgtcaatattgtcataatgctgatacgtgggaaatcggtaaaggtaaagaaataacagttgaagaagtgatgcaggatgtgacatgttaccttccatttattgaagcttccggaggcggtataacagttagcggtggagagccattattacagctagactttttaattgagttgtttaaaaagtgtaaagaggctggtatccatacaacaatcgactcttctggtggttgttattctgaggaaccagaattccaaaataagctagatattttaatggattatacagatttagttttattggatctgaaacatatcgattccaaaaagcatcgtaaattaacagggaaaccaaatgaacatattttacaatttgctcgttatttatcggataagaataaaccgatttgggtacgacacgtattagttcctggtgttacggataatgaagaggatctacaaaaactatctagctttattcaaagtctgtctaatgttcaaaaagttgaagtgttaccatatcataagcttggtgtatataaatgggaggcgcttggacacaagtatccactcgcaaatgtagaaccacctactgagaaaaatgtagaacatgctaaatatattttacaagcggtctaatccaaatattggattaggctttttgctttctttacaataaaatctagagtatatattgataaaagagtatactgaaaatagaatatccataattttgtacggaataaatggagaaatttacataattgtaaagggaaatcaaaatagtaaaaagaattaagaagtaaaagagtgagtatcatggaatagagaacatttgtaagttattgcgaaagctcttataggaaagtataatgtaaagatatgagcacagataggattaaggggtcaatcttatatgctttgcatatccacgacaggtacatagctgaaagggaattattagaatctgtttatgtaatttttaaggaaaatgtttttcctattgtcgtatatgcaatatggagaaacaaaaagctaggagtggatttgtttgataaaaaaccccaaggttttaatattaactgcacattacggtaatggtcatgtgcaagtagcaaaaacattagaacaaacatttcgccaaaaaggaattgaagatgttattgtatgcgacttgtttggagaatcacatccatttataactgacattacaaaatatctatatttaaaaagttatacaataggaaaagaattatatcgtttgttttattacggggtagaaaaaatttatgataagaaaatagcatcttggtatgcgaactttggaaggaaacgtttgaaaacacttttacaggtggagaaaccagatattgtaattaatacatttccaattatcgctgtaccagaattaaagaaacaaacaggtatttcaattcctgtctataacgtattaacggatttttgcgtgcacaaaatatggattcatcgagaagtagatcgttattttgttgcaacggatcatgtgaaagaattgatggttgatatcggtgtacctgcggaacaaattgttgaaacaggaattccaattcggagtagttttgagttaaaggtaaatccagaaatcatatataataaatatcagttatgtaagaataaaaagattttactaattgtagcaggtgctcatggggtattaggaaatgtaaaagaactatgccaatcatttatgtcagtgcctaatttacaagtagttgtcgtttgtgggaaaaatgaagctttaaaacaggatttattaagtttacagaagcaaaattccgatgcattaaaagtgtttgggtatgttgaaaatattgatgaattattccgtgttacttcttgtatgattacgaagccaggcggaataacattaagtgaagcagcagcgttgcaagtacctgtcattttatataagcctgttccaggacaagaaaatgaaaatgcgatgtactttgaaagaaagggagcagcagttgtcattcgcgatgatagtgaggtttttgcaaaaacagaggcattattacaagatgatgtgaagcttcttcaaatgaaagaagcaatgaaaagcatctatcttccagagccagctggccatattgtagatgcaattttggcggaaaatcatgcagaaccgcgtcatatacctattaaatcacctgctcttgcacaatcttttacttaatatgaaaccctctttgtatatgtaaagagggttctttattatttttaaaggaaatttagtgagttatccacaaaaggattgcgctttcattaaacagtaaagtcggaatattaacaactatatccacattgtccacaatttttagaaaaatatccacaattaaaacagctgatatatgctttaatatagaaaaatattaaatgtttttgaaaattactaacaatttcatcggttttgtggataaagttgtccacagcaaaaaagtcccttatgtataaggggcttttttgcttacttctatcagtcgagaaaattatgtaatgaaaatgaataattaggggggaaacttctaattattcattttcactttaaatgcttttcgagcgatatcctgctgcacgatctgctttttgaaattcgcgttgatagagaacttcttgtgtactagataatgtgttttttgctttatcacgtttctttttatccattacaaatcacctcgtgtcttaaagttactatttatcgtttccaaagacatgaggggatatacgcatatggaaaatgttaacgattgattatcatttcagaaaatttagattacgcttcttttaattgatgagcatcttggaaggttgtatctcgcattgtagcaagtgtgtattgatcttttggaatttcatataagttatacacttcttcgtttgcgttaatttcatcatatacggcttttcttgtttcgtttgctagattcacatattgcagtttttctgcagctttaatagaacgaatatttattttacgaatacgcatgaaaattgtttcaatatctaattcatagaaaagttcactaaaaaatgaatcttttgccaatttgttatagccttttccatgatatggtttgccaagccatgtcccgagaaatccagctttttcttgcacatcaaataaagtaattgttccgatagggttaccccattcatctaaaattgtgcgtgaaattaattcaccacgctcttcagcttcaatcgtttgtttcgttaagaataaatattcttcataagaataagccttttgacgcacaaaagggaagacagctggatccaccattaactcgtatagaacgtggctgtcgtgtaagtcgcgttttttcaacatactaactcctcctcacacgagggtagcatgacgaaaaaacaccccaccctcgaaatttttatatcaatctttaaaaaatttcggggtgggaatcgaacccactagaaccagtttctaacgctggtggcgcaccatttgccttccccattcatcaatttgaaaatgataatcacgacacaaattgattatggtttcattcagtttataatcgtataatactttatctagtcaaaaaaataaactagttttttttattttttttgtaaattatttttccatcaatcatagttagtacaggcttggctaaataatggaaaggatgatgagtccatagcacgagatcggcgtcttttccaacttcgatgcttccaattctatcctctaaacgcaaatttcgtgctgggaatatggtgattccttctagtgctgttttctcgtctaacccttctcttactgcaacagcagcgcaaacatttaaatattgaatgggtgtataaggatgatctgttgtgatagaaacttccacaccattttttgataatatatggtaagtatcccatgttttattttttagttcgattttagaacggcgtgtcagagtgggaccgactgaaaccttcaaattgtgttttgaaagttcttcaacaataaagtgtccttctgtgcaatgttcaatgcgtaaatcgagattgaattctgttgcaaagcgtagagcagaactaatatcatctgctcggtgagcgtggatacgtacgggtatttcacgacgtaatgcttttaaaataggaagcattcgaaaatcagcttcgtgcccgtagtgttgtgcttcatagaatgattcccgaagtaaccccataatccccatacgtgtaatggattcttttgttccattactatggacttttttaggattttctccaaaggcaatctttaaaccagcaggttcttgaataatcatatgatcaatacaagttccagctgtttttattacacaagtagtacccccgataatattttgactgccaggcataacgtgaacggttgtaattccgttttgtacagcgtcttgaaaggcaatatcgaaaggatggattccatctaaagaacgaatatgtggtgttgaaacttcagatgtttcattggcatcatttccagcccaaccagtaccttcatcatagagaccaaggtgagtatggacatcaataaagccaggtaagagatggagtgctcgtgcatctataacggtcatatcttgagtaggtggaataaaaggtttgacctcggtaattcgctctcctgtaacgagtacatctccttgaaacttttgagatgtaatagggtatacaatggcttgtttgagcaatattttcataggtacctcatttctgttactttataatgctaatggaagttaagggaaagtaactgaaaggttatttgtatggtaatgcttcggatcctagaaaatgaaagttttgaaagagcccatgtaaaattgtgttttagaagtactacattgtatgcgaaagtatattttgtaatgcatggtctatttctggaaatgtgtattggtatccatgttcaattgctttaatgggtaatacacgttgcccttctagtacaagtatgctcatttcacctaataaagtttgaatgataaaagaaggtacaggcaaccaatgaggctttttcattatagttgcaatggtttctccaaattccttcattcttataggtgttggtgctgtcatattaagaggaccatcaatttcttttttgtgtataatgaaatccatcatacgaacgacatcgtctatatgaatccatgataaccattgcttcccagaaccaatggtgccgccgatatagaattgatagggaagtagcatttttggaagagctccttcatttgcacctaatacaactccaaatcttgcgtagattgttcgtattccgagagaacgtgctttagatgcttcttgttcccatgaatatactgtatttgctaaaaagtcatttccaggagtctcatgctgttctgtaaaagactctatttcagacgttccatagtatccaatagcacttgcgttaataaatgtgtgtggctttgtatggagtccctgcaattgtttaatgagtccttttgttgtttgaattctactgtttaaaatggctttcttttgttgctttgtccatctactattaatagactctccggctagattaataactacatcaatagaagagagggggaaggtttgtaaatctggtgtccattgaacatactgaaggttaggatcggaagtttcagtagttttttttcgtgtgagaatgtaaacagtatatcctttttgaataaaaaaagtagaaagggatttaccgataaagcctgtaccaccagaaattgcgattttcacaagtatttcctcctcattatatatattcttgaaaagaaaaaatgttcctcgactatgttaaaataatagagaggtgagagtatggctgtcattacaaaaatagaagtacaaaaacgatcgaaagaacgatttaatatttatattgataaaggtcaaggcgaagagtacggatttagtgtggatcaagtaatcttaataaaacatggattacaaaaaggcttagaaattgatgaaatcgagttaggaaatattttgtacaatgaagaagtgcaaaaagcatatttacaagcaatctcctatttatcctatcaaatgagaacaaaacaagaaatagaagattttttacgaaaaaaagaagtgggacaggccatcatctctgaagtcgtttcgaaattattacatgaccgatatattaatgataaagagtatgctgttttatatacgcgaacgcaaagtaatgtgaatcgaaaaggtccaactgttattaaaagagagttattaaataaaggtgttcaggatttaattattacacatagtttacaagaatatccgaaggaaaagcaaattgagaatgccttgtttctcatagagaagaagaaaaaatcttatcaaaaacattcttttttacaaatgaaactaaagttagatgagatgcttgttcgaaaaggatattctagagaagtaattcaaatttgtttggaagaattgaaagacgaaaaagatgacgaaaagcaacaagaagcgttacactatcatgggaataaatattatgagaaatataagaagcatgatggatggacatttgaaaacaagatgaaacaagcgttatatcgaaaaggattctctattgatgaaatcgagatatttttgcaaatgaaacgcgaagaggaatgaggagaataagatgaatatgccaaaacgctacagtgaaatgacaccgcatgagctaagggaagaaattggcgctttgaaggagcaagcagtaaaagctgagcagcttgggattgtcaatgaatttgatgtattaatgagaaaaatggcaatggctcgtgcttatatgacggatataaacaaattccgtattggtgaaacatatgaattagtagaagaacctggtgtattatttaaaattacgtatttcaatggggtatttgcttggggatataagcaaaatgataatgaagagattggcataccaatttccttattgcaagaaaaataaaaaccagagagcatatatctctctggttttcatctttggtaggcgttaaaggagataggagattctaaaattggcgttttttacattcatttgccaatataatgagagactgggtttgttgcgtctgtccgttaacttgcgctttcgcatgttttggacgagtccacgtatggttaaataattcagaacgactatctaagcgatcacggtagctcatctttatcacctcgtgtaggaagttaatttaatttgtattactcttcctgctgatttgcagcacgcatacgttcttgtgggtgcgtgttaattgtgccgttaggtcgtttcgaagcgaagcgtgatttcgctttcggttgaccgtcgattttgctgttgttttttgactcagaccaaaattcggcttgtttacccattacgaacgccctcctcattatcggttgatacctctttaagaagtatcaattatagaatgtgcaaaattgaagaaactatcctttagaaatgaagggataaataggtaaaaggagattataatatgaatgatatttatgaaacattaacgaaagaattattagacaagaatgacaagctttcttacgcacaagctcgtgcgtgggttgagttactatgggaagattttcaaacaacttatgcaaaatcaggtcgttatcaaggcgatgaaatgacagaacaagtggtacgatcatggattaataatcatggtgtacgccttcatgaaatgcgtacaaataatccgaagtatagtcatttaattaatcaagaagatcatttgaaacattaaaaaaagcgacttaagtcgctttttttaatgtggaagtaattccagtttttttcgaagcttttcttcactaaagatccatcctgtataggaactaataatatttaaattgtggtcgagctgaacgattgcaacaaatggataataatctttacttcgatatcgtaaatcaatgaatcgtacttcataataatggtcatgatcaaaaatatcccagcgatatacaggagagaaagatagaaaggccgagatgttttcatcttgtttagctgctcgcataatattattgtctgggaacggtacccgatcgaacttatcatatatcatgatgttaccacggtgccatctcgcaacgtagtaataatcagccgtaacgattgctaaatggtaatggtaaaatcggtaagaaggagaaatgataatcttttcgacatttttgaaacgtttgtgtacaacgcttcttatatttctgtgcatcataatccgtccgatatagtaaacaatcattaatatatatgccgctaaagctgtatatcccttatgagaaccgacgagcatgcaagcaattgcaagtatatggataaagaaaattacggtatcgaatgtattaatcacgccgagtgcgacccatttttttgtgaaaggccgtaatgcttgtgtaccataggcattgaaaatatctacaaagacgtgaaggaagacagcaataaatgaccaaagcagtagatgaagatatggagcgtctgaaaagaaggcgaaagagatgccacttataaggaatgaccaaagaattaccgcaggaatagaatgagtaattccacgatgatttcttatatatttagcgttattacgcaattttaaaactgtgtcaatgtcaggaatgttggaaccagcaattgtagcaagcataacagcttgggggccaatatcactttgtgctatggctggatctaatgttgctaagctacctaaagtgatacccataacaaggtgagtggctgtgtccatagaaatccacctccgttttttattaatgtaactctttttattcgatacctcaagtcctttgccttctatttcctgtatcatcttacttaaattttttcctaaaatctttataatagtacttatatgcaaaaaaatgagggggatcaagtttgacacttgaaatactaaacaattttaatatagagcagtttcaaaatgatttaattggttggtttgaagaagaacagcgcgacttaccatggagaaagaataaagatccataccgcgtttgggtttctgaaattatgttacagcaaacaagagtagaagctgtaaaaccatattacgcaaattttatggggaagtttcctacacttgaagcgttagcgaacgcagatgatgaagaagtattaaaagcatgggaaggtttaggatattattctagagcacgtaatttacatgcggcagtaaaagaggtaaaagaagtatacggcggagttgtaccaagtgatgtaaagaaaattgaaaagttaaaaggagtgggaccatatacaaaaggtgctattttaagtatcgcatatggtataccagagccggcagttgatggaaatgttatgcgtgtattatctcgtattttatcagtatgggatgatattgcaaaaccaaagactcgaaaagtttttgaagagattgtgcgtgaaattatttcagtagaaaacccatcttattttaatcagggattgatggaattaggtgcactaatttgtattccgaaaaatccagcatgcttactttgtcctgtacgtgaacattgcagaggatatgctgaaggtgttcaaaaagaattaccagtaaaaagtaaagcgaaagctcctaaaatggtacctattgttgcaggtgtacttcaaactgaagacggtcgttatgttattaataaacgtccaagtacaggtttgttagctaacatgtgggagtttccgaatgtggaacttggagaaggtattcgaaatcagaaggaacagcttatagattatatgaaagaaaaatttgagctcgaggtttctattgatgaatacgcaatgaatgtacaacatacgtttacacatcgtacttgggatatatttgtattttacggaaaaataaccggtaatattgttgatacagatacattaaaatttgtatcaaaagaggtatttgagcaattacctttctcaaaatcacaccgtactatttatgaaaattgtgtggagaaaattacaatgcaataaacaaaaaaagtgttcccaatctagggaacacttttttaatcgtaagaaatttttgtcccatgagtccaactagcttcaccttcttgtaagccgcctcttgattcgatttctactacaatttctttgtaaatactttgcccttctacatttaaataaggcagaacctgttgtagtgagtgatgaaaataagctaattcatcttctttccattcattttttgaaatcatcgttagttcagtcatatcgcgtcctatatacatatttacacctccattttctatagtttgaatgagtaacaaaagttatatgcggaaattttaaaaaagaaaattacggatagcttctaagtgaattggttacattattgattgtggaggtgagaaagatgagtaaaaaacaacaaggttataacaaagcaacttctggtgctagcattcaaagtacaaatgctagttatggtacagagttttcaactgaaacagatgtacaagctgtaaaacaagcaaacgcacaatcagaagcaaagaaagcacaagcttctggtgcacaaagtgcaaacgctagttatggtacagaatttgcaactgaaacagacgtgcattctgtgaaaaaacaaaatgctaagtcagctgcaaaacaatcacaatcttctagctcaaatcagtaatgaaagaaaaacacttctctaattcgggagaagtgttttctttttgcgtggatcgttgtaatgaaaaggaagcgaacgacataacttctaataagtcaacaaatgtagtcaaaggagaaggaagttaaaaattagaattatgtaattaggaataataactgatgaataagtccaaaagggggtaagtaatgaacgattttgataagttggtaggggagcaattagaaacgatggatgagttgttaaagttacaagcacatctagagaagtatcaacaaatcgaaatgaatgaaaaagatacgtgcgataaaaaagaactgcattttatccgtcaggaaatatatagaacagaagtagcgttgaagatgttacatgagaaatttgaagaacaaacgaatagtgtaattcaatcttttacaactgaaaaaatgatttcaaatttaggataagatatattgttatcttcaggtgaaaagtccttctttgtatggaaatagagaagggctttttctattacatgtcctcgcttataaataatgcagtacaatccctatctcttaagaagagttggggcatagtattcaacgataaacctcctgcatattcagtttgaaaaatagagtcttatccctttagttttaaaatttcgacaaaaaagttataatagaaaaaaagtgaatgccgttcaaagggcatttgcagttgaaagaagggagcatatatgggatttcccaaagaaggagaaaaagtacaaatacatagttataaacataatggctccattcatagaatgtgggaagaaacaacaattttaaaagggacacagagtcttgtaatcggagcgaatgatcgtacagtagttacagaatcggatggccgaacatggattactcgtgaaccagcaatttgttattttcatgccaactattggtttaatgtgattgggatgcttagggaagatggcgtatattattattgtaatttaagctcaccttttgcgtatgatcctgaagcattaaagtatattgattatgatttagatattaaagtatatccagatatgacatatacgcttctagatgaagatgagtatgaaaaacatagtcaaattatgcagtatccacctgttattgatacaattttaaaacgaaatgtagcacatttaacacagtggattcatcaaagaaaaggtccatttgcaccagacttcgtagatatgtggtatgaacgatatttaatgtacagaaattaaaacaaacctgcagggggcttcccggcaggtttgtcctattagaggggggattatgtgcaaggcataaaaagatatttacaatttgttaaaccatatcgatggcttattgctattacaattattattggactagttaagttcggtatcccacttattatgccgtggttattaaagtatattatcgatgatgtaattcaaggcgcgggctcacttcaagataaaacatctcaattaataacagcgattggaattgctttttttatttttgcggtattaagaccaccgattgaatattatcgtcaatatttcgcccaacatatcgcaaatacaatactgtatgatttgcggaagcatattttcggtcacttacaaaagttaagtttacgttattactccaatacaaaaacaggggagattatttcgcgtgtcatccatgatgtagaacaaacgaaggattttgtaattactggtttgatgaacgtctggttagatactgcaacaattgctattgctatcattgttatgttttctatgaatataaaattaacatttgttgcgttattgattttacctatttatgtaattgcagtgaaatattttttcggacgtcttcggaaattgacgaaagagcgttcacaagcgttagcgacgatgcaagggtatttgcatgaacgtattcaaggaatgcaagtgacacgtagctttgcgttagaagagtatgaggggaagcagtttgaaaaaagaaataatgaatttttaacgaaagcattaacccatacaagttggacggcaagaacattttcggcagtaaatacgttaaccgatttaggtccgttacttgtgattggttttgcagcatatgaagtaattcaagggcagttaacgctaggaacgatggtagcttttgttggatatatggatagtttatatagtccgcttcgccgccttgttaattcatctacaacattaacacaatcttttgcatcgatggaccgtgtgtttgaactgttagatgaaaaatacgatattgttaatgtaccaaatgcggtacaaacgaaaaaattaaatggagaaattgtatttgacaatgtttcttttcgttataatgcagatgaaaaagagatattacacaacttgtcattaactatgcagcctggagagaaagtagcgcttgtaggagcgagtgggggaggaaagtcatctcttgctagtttgatcccgcgtttctatgatgtttctgaaggcgcggtttatgtagatggcatagatgtaagaaagtacaatatgagaaatttgcgtagtcatattggaattgtactgcaggataatttattgtttagcgatacaattggagctaatattttatatggaaatccgaaagctacagagaaagaagtgattgcagctgccaaagctgcgcaaattcatgattttattatagacttaccagatggttataatactgtcgttggagaacgtggtgtgaagctatcaggcgggcaaagacaacgcgtggcaattgcacgagtgtttctaaagaatccgtcggtacttatattagatgaagcaacttcagcattagatttagaaaatgaaaggtatattcaagaggcgcttcagacgttagctgctgaccggacaacgattataatcgcacatcgattagcgacgattacgcatgttgatacgattatttacattgaagacggtgagattaaagagactggttctcatgaagagttaatgcgaaaaagaggattttattacaatttatatcaacttcaacatataacagaaacagctcctttaccataaaaggagctgtttttttattcgtcttcttttttatcatcgatttggagttctttttctggtttatgatatgtgtagaagctatctacaagcaaatctaaatgctctacttcttcgctatagttaatgatggaagaaataagagggaagagatgtaaccatgttttatatgcttcttcatcgtccttattttgatattccataaagatatcaattaattcttgtttacctgtttcaacttcatcaagcatttcaactgattgttgtttttttgctttaccaataaattttaataaaacttgttcatgataatgcgttaatgagtcaagttcattttggatagattcctgaaattcttccggcatatagcgcagttcattttcagtacggtgtaatgattttaacgtacttaaagcacggcttgttgtcgctaacatttgtctgaataaaacgagcttacgaatttttgcgaactttacttttttcgtatagcttctttcttctttatacagcaaatagtaatgatttagtttaatcattttttctttcatacgatcaatatcagtttttagcgttgtaaaatcagaagcctgcctgctattcattcgaatccattttacaatttcttctgtattatcaacgatacgatgataaagttttgtttcatattttggcggcataaatactaaatttacaagtgaagccgcaataataccaatcataatcgtcgcaaatcgaagtaaggcaaaactaaagaaatcttcgccttgatactccataatggcgataactgttactaaagcaattgatattgtgttttctaatcgtaattgtaatgtaagagcaattactaatatacatgttaatccaataataaaaggattatgtccaaaagcagtagcaaatgcgatagcaaatatcgcaccaattacatttgcttgaatttgttcaagtgctgttaaataagaacggtatacagacggttgaacagcaaagatagctgaaattcccgcaaataccggactcggtaattgaagtaaaatacaagcaaataaagctaacgtgatggcaatacccgtttttaaaatgcgagcaccaagtttcatacccttaataagatcctttctcttgtcataatgaatgtacaacatgatactatacattcattacaatatgttagcaagtgatattttagtgacgttaaaagaaattagtgttcattttatcccgctaattgtgagtagtaagattcctgcctcaaaaattagaagctagatgccggtaaacgctcgattggtgtaggctaattaaagtttcactttataatttttcctaattccttttaaacatcagtttttagtaaaaaaacctgctgaatttcagcaggtctcaaattgttactatagattactatgagaagcgtacttcgtcaattttttcttaataatgaaaattactcattttactctgttgagatagatgggtctgcctgttcttttttcgggataatctcaaaaaactggttctgtatatcatctaataatgctgttaataaagcaacttcctcatattgctcatgttcgtttagtacacgaatatagtctagcaataattcagttacatctttcaaaccatttttactaattggttgtaatgtaacatttgcgccttttgcaattcttctttttaaggcctgttctgttaggcctaagtttgaatcatgacgcaaataaacaacaccgccagtcatgccagcgcaaatccatggaccagggtcacctaaaacaagcgctcgcccatttgtcatatattcaaaagcaaaacctttaatattggagtatgaccctatatttccttgctctttttcacggagtggttttgttattctacctccaattatcatgtctgccccagaaaggcgaatgccagcgcgagcatcagcgttcccttgcacgtatagtgcccctttttgtgcaccatatccaaatccttttccgacagaaccgttataatatactccgtcttttccttttgatttcgttatataaatcccaccaccaaaggaagttttaccaatgccatcttgtgcgccgccatttacgtgtataaataaattttcactattgtaagcgcctaacccatttccgggaatagaaccattcgtatactttaatgtaagtggttcaagttgagtagcttcatatagtttactgcgaacgcgataacatgattctagaccacccataacgcgttgctctacaccaacgcctactaattcttttgagtcagcggaatgaactgtcttaaattgtttttctggtacaccatctgttgttgtaacagatggatgttctattatttgtaataaattacgtaagtttaataaattttcgcctcgaacttgctctaataaatcagaacgcccaacaattgcttgtgaatttgtatacccaagctgtcctgttaatcgttttagttctataccgaaagaggtgaataaatttagcaggccagtaactgcgctttctaattcgcgtgggacgaagcggcgtaacccatgttcctttgcttgtgcttcagactcgatttgtgttgcaattccgacatggcaagtatctagatgacacccacggcaagtagtgcagccgattgcaatcattgatagtgtgccaaatccaatacggtttgctccgagaagcatgattttcaaggcatcatttacacttcgaataccaccatctgcccaaatctctactttatgtctcatgctcgcttctaataaagcgttgtgagcggctttaacaccaatttctacaggaagacctacatgttgcaaggcgtgaatacgtgcagcacctgttccgccatcgaatccgctaatgttaataaaatcagcaccagctttggcgataccgacagcaattgttccgatattaggaacgacagggactttcacggctactttggcaagttgattagctgttttaatttccgtaatcatttgagctaaatcttcaattgaataaatatcatggttattagaaggtgaaattaaatctgagccaattgtcgcattacgtgcttcagcgattttggctgttacttttgaaccaggtaaatgcccaccttccccaggctttgcgccttgaccgattttgatttcaattaagttcgatgagtttagtagttcggcatttactccaaatcgcccagatgccacttgttgtccacgtgtatgtggatattttccaatcatatctttaatttcgccgccttcaccgttcaagctaatcatatttagctgatcggccgcttctgcatatgcgcgaaaggcaatttcgttttgagaaccaaatgacatagaactaataataaatggaaaatcatgatttttaatgccgatagatacttcttcagttggaacgacatgttttgtttgtttcgtttgaacaaggtgtctgattgcgatgggattattctcttctagttcacttaacttgtcacggtaatcatcataagaatttccttttgcaacatcgccgattgctttccaaattcgcgggaatatatgaaatgattttcgcattctaattttaggattgttataatcatccgctcgcatttttgcatcttcagcaagtgattcaagtgaaaaagctaaatcatttgaaccgaagaaatttgtaatctgtaatatatttgcgatttcttcatgtaacccaatagatgaatagagacgtccgtaaccacgtaactcatgaattccaattgttgaaatgactttttctaatcctttattaagtgcattatacagattcgtaattggtgtttttgttccatcatttacagtcgcgaataataaatatggattaatactatctgctcctaatccatatagcgtgacaatgtcatgtaaggagcgaagggcaccagaacgtataacgagagaacaattgcggcgtaatttattttcacttaatgcttgatgtactttagcagtaactaaatgtggatcaatccacaatctttcatttagatgggcttttacgtcatctaatactagtagggaagcaccattgttaacagcagctatcgcttcagaactaatgcggcttaatgcacattgtagagtttctgacgagctgaatgtagcagagattgtggcgatagagttatgagttttaaatagctctatgagttgttcgtacgtaattgtgtgtaattcctctgcaataggttgtgccacgctgccttctaaaataattggtgaaagcatttcaactagaaatggccgttttgcgccgcttaataaacttggacgctctccaagtacagtacgtgtagagaagtgttcaatttcacggtcacggtcaattgcagggtttgtaacaacagctacactttctttaatgaagtcagcgatatttcgtctatcagtatcaagtgcggcaagtggtgagtcatgcccaagtgagcgtattggctcaacgccttttgttgccatctgttcaaggagttgaatatgttctcggtcccatccgaaagcgacgtattgtttcgtttcaacttgaacagaatcacatagcccttggatttttttcgtttcagggatagataaatttaaatggtaattggtagtatcaattcgctttttaaaacggttatatacttggatttgatatttgtcatattcataaagaacaagttcatcttgttcattccattttaatccgactttttctccaggagcgagtggttttggttctgctacatatttagttggtgatacaactccaggttcagaagagaaaatataagagctctctgtctctactttccatactgggcgtaatccaagggaatcaacgctgaaaacagcttcatctttaaaacgggaaatgatgccagctggtccttgggcaaaatgtccccacgcttcacgtatatacgtatataaatcttgtaaaggtgtttcataaagtttaatttcattaataattggtgggaatagaatttccattgcttcaaataagctgtagttgtattgaacaagtagggtttctaaggtgcggtttaaatcttgagagtcactgcctcctgcagtaagtggtacatcaatcatttcagcttgatcgcgtaatttcgcaattgtgttaatttcaccattatgtccgagaatgctaaatggttgtacacgaaaaaaattagataatgtattagtagagtagcggttatgtcctaatgtcatagttgaagcgataagcggatgttgtaaatcattatagtaggcaacaagcgtatcaccagcacctagaactttatatacaacatgattacgacttaatgaagcaacatgaattgcttcgttttcctctatttttattgtgacagaaaataatgtttgctcaatatttgtaatttcgttttctgcgataagggcaacttgccaaaataaaggttcttcttgtttaccaagtggaccgagtgcatctgagtttgttacatcatcactttcgaaaatgatagtaaagtttttgttgtttaattgcgtacgaatataatcttttaaggcagtaatgtcttcttttttatttagaaaaaaatgtccaacgataaagtggggatgatccacaatcgttggattatatccgctactttttagtttttcattccaaagcgtttttggtatatcaatgtgaatgccgatgccatcgccctcaccattaatgaaaccagctctatgattcattttgacgagtgattgtatgcaaaggtcaatgttttcttttgtagcaatttttcgtttctccataacggaaacgattccacacgcatcatgttctgcatttctataatctcgaaataaagacggtgtccatgtattttttttattgagcatccgtcaatcccccctcttgtaaaagttagaataatcttactatttaaggtgcgaatcaccttgtacacagagatagtaatgctgtaaaagagtataaaacagataattatgaataattatactattaatacggaatttatgaaatagaaaaaaggaaaaaagaaaggtgagctttcttttttccttttaatgacgggattatttattgtctgctagggcagcaaatgctctgccgacagcttcgattgtatattcaatatcttcttttgtatgttctgtagttaagaaccatgcctcgtatttagaaggtgctaagttaattccttcttgaagcataagcttgaagaatttaccgaacatttcaccgtctgtatcttgtgcggcatcgtaatcttcaattgtatttgttgtgaagtatacagttaaagccccttttagacggtttaatgtaatgtcgatattatgtttcgctgcttgttctaaaattcctttttcaagcattgcaccaagttcatctaatttctcataaagcccttcttgttgaagcacttctagacaagcgatacctgatgccatagaagcagggtttcctgccattgtaccagcttggtatgcaggtccaagcggagcaacttgttccataatttctttcttaccaccgtaagcaccgattggtaagccgccgccaataactttaccaagcgctgttaagtcaggtgtcacaccaagtaagtcttgagcaccaccgtacataaagcggaaagcagtaataacttcatcataaattactaatgcgccagcttcgtgaacaagttcattcactttttcaaggaatcctggtttaggctctacaataccgaagtttccaacgatcggttctacaaggatagctgctacttcatgaccccatttatctaaagcctcttttaaagtttctacattattaaatggaacagtaataacttcttgtgcaatactttgtggtacgccagctgagtcaggagttcctaaagtagaaggaccagatccagctgccacaagtactaaatcagaatgaccgtggtaacaaccagcgaatttcatgatttttgtgcgacctgtataagcacgagcaacacgaatcgttgtcatcactgcttctgtaccagagtttacgaaacggactttatctaatgcaggcattgcttcttttaacatttttgcgaattttacctctagcgctgttggtgttccataaagtaccccattttcagcagctgttgtaattgcttttgttatatgcggatgagcatgtccagtaataataggaccgtatgctgctaaataatcgatatatttatttccgtctacatcccagaaataagcgcctttcccacgttccatagcaacaggagcgccgccgccaactgctttaaaagaacgagaaggactattaacaccgccaacgatatgctctaaagcttctttatgtaatgcttctgactttgtgaatttcactacaattcatctccttacaaaaatctatgtattattctaacatgtttttcgaaaagacgtattgtttgtgatagcgaaggcagttgggtaaactattcgttgtgacatttaggaggggggtccgattatgaaatcggtaattgaggtacaagggttacgtaaagagtttacagcctattcaagtcgtccgggcttaaagggtgcatttcgcgatttattaaatcgtaattataaaatagtaccagcagtaaatgatgtatcttttactgtaaagcaaggtgaaatggttggttatatcggtgagaacggtgctggtaaatcaacaacaattaaaatgcttacggggattttaactccgacatcagggcaaatcacagtaaatggaatgaacccacataaacaaagagaagaatttgtaagaacaattggtgttgtttttggacagcgttcgcaactttggtgggatattgcagtacaagaatcgtttcgtttattaaagaaagtgtacggtgtatcagacgctcagtataaggagcatatggagcacgtaattgaaacgttagatatagggcctttattagataaaccagttcgaaaattatctcttggtcaaagaatgcgttgtgaattagcggcagccttaattcataatccaccgttattatttttagatgagccaacaattgggttagatgtacttgtgaaattgaaaatacgtgaatttttaaaagaaatgaatgaacgttataaaacaacaattttattaacaacacacgatattactgatattgaagctttatgtgagcgcgttatcatgctggatgaagggaatattatgtatgacggttctttaagtaatcttcgtacgcagtggggagcagagaaggaaattcactttcagtttgttgcaccagtttcctatcaggctttatcaatggttatgccagataatcatgtcgtttggtcgaaagcgaaagaggaaaatgcatgggttgcaaaaattccgaatgaagaagttattatttcaatgcttatttctaaagtagtacaagcatttcaaattaaagatttaaaaattaacgaagtgtctacagaggaaattattcgtaacatttatgaagaaggtattacgcatgggtaagtatattgaaatgattcgaattcgctttttaatgatgcttgcgtatcgtacaaattactatagcgggattttaatttatacgattaatatcggtgcttactattttttatggcaagcaatttatagcggaaaagagaatattgaaagtttatctatttcgcaaatgaccacgtatatcgcaatcgcgtggatggcacgtgccttctattttaataatatagatagggaaattgcgatggagattcaagaaggacgtgtggctgtagaattaattcgtccgtataactatttgggaatgaaagttatgcaaggtcttggcgagggaatattccgttttgccttcttttccattccaggcatggttatcgttacgttattattttcgttgcaaattacaacgaattttcaaacttggttatatttcttcttatctttaatatttagctttattattaatacacaaattaatttaatgacgggaatgcttacgtttttcctatttaataatagtggaattatgtatgcaaaacgcgttgttattgatttattttcaggtctattattaccaattagtttttatccgttatgggcccaaaaagcaatgatgtttttaccgtttcaggctattagttatattccaagtatgattttttctgaaggtatacaggggagtaagttgtatgaggctttagtatttcaagtgatttgggcgattgtacttattattccaattgtactcatgtggagaacggcgagaaaacgtctaattgtacaagggggatgatgagatgctatatataaacttatttttacaatatgcaagtcaatatataaaaacgaaattggagtatcgaggcgattttatcgttggtttactttctgatttatcgcttcaagcagttaatttaatatttattctcgttgtatttgggcatacacaagcattgaagggatggagtcgagaagaggtaatctttatttatggtttctttttagtaccatttgccatcttttcagctttctttaatatatgggattttaatgatcgatacattattaaaggggagatggatcgtgtattaacgcgaccgatccatagcctatttcaaattatattagaaagaatggaacttgaatctttaattggagctattacagggattgttgtaatgggatatgcagctgtggagttacaattatctttttactggtatgatttcttcttatttatattgatggtaggaggaggagcacttgtatatggagggatatttgttacgttggcgagccttggtttttggtcggatgcgaaaagttcaattatgcctcttatgtataacataggtaattacgggcgctatcctgttaatatttataatcgtgtaattcgtttcattttaacgttcgttttaccgtttgcgtttgttggagtatatccagcagcatactttttaagaaaaacagaatggaatagttatgcatttgcgacgccaattgttggtattatctgttttacgattgcaatcaccctctggaaccaaggggtaaaaaggtatcgaggcgcgggtaattaattatagaagcttgttcgtttctaagggataaatcagttctccacctcatacatataaaatgaggtggaggacatgttatggggatttattctattaattgcagcaatcgctattttgaaaagtgtccaattattatggagttcctattcggattcaacgcgttttttttcgctctataatttggccacattatttttaatctatacaacagtactaatcgcatttggattaagttacgttgtattagaggaaatgggtttcgcagttttgaaagaggacggagaaagtttgaacgctcattcttttcaactcgtcgaagtttgtttatattttagcgcagttactttattgtctgttggatatggtgacatatctccgattggaattgggcgatggattgcaatcgcagaagcgctaattggatatacactcccttttgcttttgtgatgaggtctgtaatagacaatgaaaaataaggaagcatttgttatagtaaaggaaaagagtaggagtgataactatgattacagtaggagaaatggcaccagaattcacattagagggaagtaatggagaagaagttcgcctagctgatttccgcggtaaaaatgtagttctctatttttatcccaaagatatgacgccaggatgtacaactgaagcatgtgattttcgtgatgcgtatggagtatttcaagagaaggatacggttattcttggagtaagtcctgattcagcgaatagacatttgaaattcattgagaaacatgaattgccatttacacttttagtagatgaagatcataaagtagcagagttatacgatgtttggaagttaaaaaagaactttgggaaagagtatatgggaatcgagcgttctacattccttattaataaagacggtgaacttgtaaaagagtggcgtaaagtgaaagtgaaaggacatattgaggatgttctttcttatataaaataaatctacattggggataaaatatgcagaaacaaggcaaatgtctatacatattttactgccttacataaagtggaagtgtagggcatacctcctcagatgatagtattccaagtgcgattatgtcgcacttttttctatggaatatatgaagaaaaaagggaaagatacataaaaacaagtcctgaatataaaaataaactacatacttatagtagaaatattgacgatttataagaaaaggagtacactctttataagaattataaaataataatccgtatagaatcggggtgcatgacggtggtcaaagaagaattaaaagaagcgctagaaatgctgaaaaatacgggtgtacgcattactccacagcgtcatgctattttagagtaccttgtggaatcaatgacgcacccaacagcggatgatatttataaagcattagaaggtaagtttccaaatatgagtgttgcaactgtctataataacttacgtgtgtttaaagaggttggacttgtaaaggaattaacttatggagacgcttcaagtagatttgattatgttacaagtcaacattatcatgtgatttgcgaaaaatgtggtaagattgttgattttccttatggaggcttggaaaagctggaagaggaagctgcgaaaacgacaggcttcgttatcaatagtcatcgcttagaaatttatggcgtttgtccagagtgtcataaggcgtaatatataataaagaaagaggctgacggctatacgtcagcctctttctttattatataaggattagcgtgaggttaatcgggatttacagtgctaagttagtaaggagggttagataaaagtttgtcgaatttactttgtattggtggaaatgaattctgggaggggacattttgaagaaatatgagattaaaaataacattccaacattggaagaatataaatatttatgtgattctgtgggatggactaactatatgaactttgaggtggcggaaatatcacttcaaaattcgatttactgtataacagtcaaggataataatcaaatcatcggcatggggagaattgttggtgatggggctatctatttctatattcaagatatagtggttcatccagagtatcaaaagaatggtattggaaagaaaataatgaatactttagtagaatacttaaatcagaatgctccagataaagcattcattggtttgtttgcgtcgcaaggtaaaacatcattctacgaaaaatatgattttaaagattattcgcctaatatgacagggatgtttactgttatttcgaaaaaataggtgtaataaatttaataaaacaattaaaaagttgattttttaagaaatcaactttttaatgagttgaaacgtttgtagtgttgcaaattcgtatttcccttgatacttatgatttataactcttcttattatacttttcatcaaattcttttccttctagatctcgatctagtgttaaaggttgattgcagtgcatacatgcatcgacacggccgagcattttggttggcttatcacagcttgggcaaataatttggatagtcttagtagataacataccaatccaaaagtaaacgacagtgctagcgataacagctaaaaagccaaccatcataaacgttgtcataataataatgttttcgcggaaaaagacacctaagtatgcaatgaagaggccgataaatactaaacttaatgcaaaggtccggattttattgattttgtttgaatacttaatgctcattctcaccacgctcctatactaataatataacataaaatttagaattttcactctcgtgtaaattgataaagggataagatatgaaatgaataggaggggggccatgaagaatgaatggacgctataaggatttttacagcggtttttcagtttttaacgggatgtgaaatttttttataaaaagtattgaccctgtatatactgcatgatatattaataaccgtcgctgatgcggaaacgcagaaaacgacaaaaaagaaattaaaaaacttagttgacattgaaaaatgaagatgttaacataaggaagtcgcgaatgagcgactaagtagttctttgaaaactgaacgaaacaaacaacgtgaaacgtcaatttttattttagatgctagacaaactaaccctccagataaaacagtattgagtccatcatatcagatggactctttttttactgtctacctataggggataataccatgttccctctttttttataaagtaaaactttaattagtggaggagggcatcatccactaattattagctcacaccaatcgggataaaagtaaggggaatgagagatggatatatacttattaatcgtcacgttacttgcgatcacaattgttattttaggggtatcatggtggaaatggcatgcatttattagtttaacagttgcgagtttatttttagctattatgtctggactgaatgtaacgaaaatagtggctgcctatgaaactggtgttggtagtgtactagggcatttagttggtattttagcacttggaacaattttaggaaaaatgatgtccgattcaggggcaggcatgcaagttgcagatttctttattcgatttttcggtgtaaaaaaattaccttgggctatgttatttgcagggtttgttatagggattcccgtattttttgaagtggggattgtcattttattaccactcgttatttcaattcgaaaaacgacgaagcaaaatatattattaattgcgttacctgtcattgcaggattatctattgttcacgggctcgtaccaccacatccaggggcgatgacagcaatcggtatttataacgcgaacttaggaaaggtacttttatattcattaattatcgcgttaccaacagccattatcgcaggcccaatatttgcaaagtgggtacataagagggttatacctgaaaatgaaccggagcttgttcgagttacgacagtatcaactgatttgccaagtcgtaaagtttcattctttattattttattaccagttgtattgatgattttatcagtagttgcaccatatatttcattaccgaaaaaattgactgaattttttgtgtttatagggagtccagtaatcgccttacttatttcatgtttcgcagcattttatttacttggtatcaaacaaggtattaataaaaagatgattaaaaaattaacagatgaaagtttattgcctgtcggttctattattttaataattggtgcaggcggtggatttaaacaaatattaattgaaagcggcgttggaacagctattgcacaaatggcagaacatatttcgttatcaccaattgtattagctttcatggtagctggtttaattcgaattgcaacaggttcagctacagtagcattaacgacagcagcagggattgtttcaccagttattcagcacatgtctggtgtgaatttagagttgctagttattgcaaccggtgcaggatcattaatgttttctcacgtaaatgatgcagggttctggcttgtaaaagagtatttaggtttgacggtgaaggaaacatttaaaacgtggacggtactcgagacattgttatcatttattgcatttggttttgctcttttgttgaatatgtttctttagggagaaaagcccattttaattaataaaacccacaggagaaattcaatttctctgtgggttttgctattttttaatcgtagttacttacaaatatacagggcaaggtgctttttatatcttttttctattgtcctattatttaatagaacggacatactgattttctccatcgtctttgacaaagactcctagctcattcaaatctttgcgtaaatgcttcttttttttcgagtttccttctcgaagggcatttcgtctttcatacaaaatagtatttatgcttttattaaatcgcgcatcctctaatttccataagctatactcatgtttataaggatcttgttccacccaggggaagtcgtgcattaagaaagtatctttaattttgcttggggtaatgtcagatgtttcacgtaaccattctcggtcttcttgatcaatgataaccacttgacgcttatctacaaaaacggcttttacatttgatctggtgatttgtttcttttgatcgtccttattcacgtgaatgctttccgaagtaatgttcatttttaaagcttcactataaataattaaagaaaataaaattcctgcaataacaccaattagcatgaggataataggaagccagaagggattaataaaatttaaaagttctataatttttgaatcagaaaagagaggaatcttttttataatctctattaatttaggtgaaaaatatccaataacgcctaaaaggattggacttactatagcaagtaacttttctaaaaaacctaatccaatgacagatgcctttttcatgtgtagttcatcctttcttatatatattttttaaccagggcatgttttaaatagtgagttttttcaccatttttatgagctcatctgagtaattttctatggatatagatgaatttgccttcaacattctttcttcgattgctcctaaaataaatgaagctaatgtgtcggtttgaaaagagttagaaaacacgccattttgttgtccagtcttcaaaatatctaataacatcgttctaagagcatcctcttcgtcgtcttcgattctgtaataaggaatgttctcttcatttcttgcattaaagacaatctcaattaaggcaatattatttttgtaatgagtttcttgataagccaagtgtgcttcaataaaagcctctagtttatttatttcagattgagctaatagtactcgattactaataaattcatgttgtttggcaactaaaaattgtaatgtacggttcataaggtaaagcttatcattaaaatgataagaaataagtccggtactaatcttagccttttttgccaccttcgttaagctcaagttgttatatccaacctcttctaatgtatcaatacatgcaagaataatttgttcacgcctagcctctgcaataaaagaatcagtcacgctattcaactcctgatttatataatttgaatgtataatcaaaaaattgattgatcgttcaattaaatattagtaagaaattattagtatgtcaaatgttttatacctacatcttgataaggctcattttctgaaacaagcccgtttttaagaaagccaagcttcctattcgccctgaaaacatactataaatggaatcccctcatttagaacaagaggaacttgttatgaatgatactaaaggaggaatagggtaatgagcgaaaagtgtgaacacagacatgatgattgtaaccgcagacatggttgcggaggcggttttgcgcttctaatcgtattgtttattttattaattatcatcggtgctagctgcttcggcggaggcggcggttgtggttatggcggttacggcggctacggatatggtggctacggcggatattgctgctaattattaaaaactattgaaaatggccttgtgcaatacgcacaaggccattttattcatatttttatatgctgtgataatttattaatgtacagagaacggattaagaagaagaaaatgatctcgataatcccgaaaaaggtgagtacgatacatgtctcttttagtaaggagaaagaaaacatgctttgtaaaaacttaaccgcaaataatgtgtgaacaccagcaacgatgtaaggaacgaaaaataaaattcctaattgaatcgttgcagagcgaaacatttctgattcagttaagccaagctttgtaatcgtaatatacttttgtctttcagttgttaagtcattatacatacggaagtatagaacactagccgcaccgataaagaaaataaagccgagaaatgcccaaataaagaattgagcaactgcatttcctttaccgtaaatgagttcatccgtagccgtatgtatgaagaaaggaacttgagcgttctcttctgtatgcttttcgtagaactcacgcgcatcgccactaataacacgtaacatatttttggttggaacgattgcattttcccagttttctacgaagtagttatagattacagttgtttcaatatgaggaatcatattatcaaatacataatcttgtacgacagctaaatgtgggaatgcaaaggatggttcgattcccttattaataaaccctttaatatgaaattcttttttattagacccgagtgtaatcgtattttgctttgcaaatggattagatacgagatcgagaagttctggtgagtgccgagaaataatataaacttctgtagaatcgattgttatttccggtcttttcaattgtttagcaattgcgttataatcactcatcttcataagcataatatcttctttggaagctgtatcttttaatactgtaaacttatattttttgtaaagaaaattattagttgtaagctccgtttcaattgtagaaatatgcttttgttcaagggaattgtcaccttctgatgtatacgtgaagggaacgggatatcgctctaatactgatgccttcgtattgttattagcggcgaataatccaataataatcgtaaatgcaagtgcagatagcatagaaacaataaagagtacattaatattactgcgtgtacgagaaactaaatctgaaatccataacatatttatttgtttcaaataaaactttctgcgcttctttaaaatatagatgaaaagaaggaatgtttgtgaaaagaataaatatgtcccgactattacgagcggtaaaatagataacataataaaaaagacagatccattttgcacatttttttccgttacgtagcctcgcggataaccagcgatataatagcatagccctaaacaaattaaagcgaataaagagatgagtatagatggtcttttttcagctggcattttcttgttccctttaatgaggtgggctgtctttcgagtacgaataaacattggtgtaaatgtagaaacgattaaaaataaaatgataaacgttacggttgtaacgataatcgcttctgttggccaatataaatagagacctttcgcacttgttaatttcgaagtgactaataagaaaaagttagaaaatacaagtccaccttgaatgccgataaagatagataatatcccaattatcatgttttcggtaaataacaatctttttaattgtctctgtgagataccaagaatagtgagtatcccgaattgctgcttccgaacatttaaaaatgttccaattgaatataagagaaagaagaacgagaacataacgatcacaagttgtgctgtactagctaagttcattagaggatcacgttcttgaaagctttgtacactctgtaagcgcggatgatacgcgtatacagtaaatgaaaagaaaaccatgatagaaaaagcactacttacaaagtaggcgaaatatgctttcgaattacgtgagacatttttaaatgcgaattgccaaaatgtcatccacgtcttcctcctaataacgctagaacatctaatatttcttgataaaatttctcgcgatataatccgcggtgtagttcattgtaaagctctccatctttaatgaaaataacacggttacaataacttgctgcaaacggatcgtgcgtaaccattaaaatcgttgcatcttcttctttatttaatttcgtaaataactccattacgtcaattgccgcttttgaatctaagtttcctgtcggttcatcggctagtaagagagaagggtgatgaataacagcacgtgctactgcggtacgctgtgcttgtcccccagaaacttcaaaaatacgcttgtccaaaatatgatcaattccaagcttttttgaaatgttatcaagcttttcatccatttcttttaatggaacattatctaatgttaaaggtagtacgatattttcaccgattgttagtgtatctagtaggttaaagttttggaaaacaaatcctaactcttgtcttcggaaaatagctaacttctctctacgaaatgtgtgcggtttttttccgttaatcacgacatcaccagaagtcggagaatcgattgtagagataacgtttaaaaatgtagattttccgctaccagatggtcccataatggcaacgaattcccctttatccacgtgtaaatttatattttttaaagcagtatgagggactttcccctcatatacttttgagacgttttttatgtgtaatacttcttccatagtaatcacctttctactttttaaaacttaatgtgttgtgataatttttgcatataaaaggaacgaattaaaaggaaaaataaaatttcaactgttccaaaaatcaacagtacgactgtaatttcagcgaagaacgagagatgtaatatttcttgtagcatctttgtcgcaaacatcgtatggattgatgccataatgtaaggtacgaagaaaagaatcgcaagctgaattgtcgctgaacgtttcatttcagtctcagttaagccgattttcgtaatcgttatatatttttcttgctcatttgttaaatctgtatacatccggaagtaaagaacactgccagcaccgataaagaaaataactcctaggaaagtaccaattaagaagaacgaagcgacatttagttttgtcttatatagagaatcgctcgcttcacttgcatggaaaggtggatgctctgcttgaattgctgcattatcgttatggatttttgttataaacgatgaaccgatattatgtgctttttcccaatctgtaactttaaagctatatacactcatttgttttgaaacgttggataatgcttctacattttcatcagatagtatgagcaattggtatattaagcgatttgggaatgggttataacttttatattctttcacttgtagttgtaaattgttttgagtaagtgtaagagtatttttgttgtctttattatgaagcgttccaataacttgatcatctaagtctttcataagaatataagattcattcttattgaccgtgagcgtttcccaatttaaagccttagcaagtacattatagtcactttgtttaatggcataatagagctgcgtgttatcttcagccgaagatacttcatatatatccgttttaaattttgtataagtaaagtgctcttcattaaatttctgctctaaccagtttaaatgttcatcagctaacgtattttcagtatgtgataaataagtaaacgggaaagggttttgtctaatttcatcaaactttgtaaacttcccgaatccatataagaatgtaatcattgtaaaagcgagcgtcgatagcatcgctacaataaagagcatgttaatgtttgtccgaatacgtgatgctagatctgaaatccaaagcatattaattcgtttcatataaaactttcttcgtgtttttaaaatacgaataagtaaaaaactaatttgtgaaaagaaaaagtatgttccagctgcaataagcgatgggatgacaaatatactagagacggcatataaaagcccaattatgtcacctagcgacataaaatacagcggatttgcggctaacgcatatccacatattaaacaggtcgcaccaaatagagagatgagcacggatgcttttctttctttttgttgttttccttcttttaaaagacgtacggcttttctcgtgcgaatgagcatcggtgtaaaagatgatacgagaatgaagaggccgagaaagatgatgatagttaaaacgatagcacttgtaggcggatataaatataaaccaggtacgtgtgtaattttggcggtaactaacaaaaagaactgtgaaaagacaagtccaagttgaatgccaaaaaatatagaaagagcaccaattaacatattttctataaatatgagtcgctttaattgtttttgagatatgccaagcactgttaaaatcccgaactgtttttttcgtacttttaaaaacgtcccgattgaatacagtaaaaagaaaaatgaaaagaacacaatgacaacttctgaaattgtcattaatatgttcagagaaaaattcacgtctgtcatatgcaatttaggatgaaataaataaactgcaaatgagaaaaagattgcgatggagaacgcactgcttacaaaataggcgaaataagctctggcgtttcttgtgacgtttttaaatgcaaactgccaaaatgtcattcacctaaacctcctaatagggtgaagatgaaaagagtatgagagatactcttttcatcaagtttgttttaaatattttgtccactcgtgtaatgtgataatttttgcatataaagtgaacgaatgaataagaaaaatacgatttcaacgaatccaaaaataataagaacggctgaaacttctttgaacagagataaaccaattacatcttgtagcatttttgttgcgaacattgtatgaatggatgccataatgtacggaatgaaaaataaaatactaagttgaatggttgcagatcgtttcatctctgtatctgttacaccgattttagaaatcgttatatatttctcttgttcgttcgtcaaatccgtatacattctaaagtaaagaacgctaccagctccaatgaagaaaataactcctaaaaatgtcccgattaggaagtacgcggcactacctgatgttattttgtataacgatcctgctgattcaaaggaacgaataagaggcccttcatactggtatttatttcgatctttttgtaccttttctataaaattatcagcaatttcatatgtctgttcccagttttgaattttgtaattgtatgctgatatatgttttacggtgttaggtaagttatttacgataacatcaggcaacactatcgtttgatatgaaaagtcagatgggattgcgtttacatgctcatagcctttaactcttaatttcgtatttgtactagagagtgtaatgtaatctctattgtagctttgctcaaattcgttgaatatggtgatataagatgtccctgttaacacatatgcttcgttatcatccataaatagttgtttcattcgtaaagaattcgcaagtttgttatagtcactttgcttaattgcgtatacgtcattataaatagctatatctttatcttcttttagtggtgtttcatatatatcagcttttattttttgataagggaaatgctctttttgtaattgttgctcaagccaatttaaatgctctgtaacaaaagggttcgcatcatacgagaaataagaaattgggaaaggggaagttctattcacctctagcttaataaatttcccgaatccatataggaacgtgatcattgtgaaagcaattgtagagagcatcgctacaataaaaagcatattaatattcgtccgaatacggtttgctaaatctgaaatccaaagcatattaatccgtttcatataaaatcttcttcttttctttaaaatataaatcagtaagaaactaatttgagaaaagaaaaaatatgttcctattgtaacaagcattgggataacgaaaatactcgaaaccatatatataacaccgatttgcgggcttactgatacgaaatatttaggatttccagctaacgcataaccaccaaataaacaaatcgcaccaaataatgaaacaagtatggatggttttctttctttttgttttccaccatttgtttttaaaaggtgtaccgctttttttgtacgaataagcattggtgtgaatgcagatacaatgataaaaagactaaggaaaacaatggttgttaaaataaacgcgttagtaggaccgtataaatatattcctggaacatgcgtaagtttggctgttactaataaaaaaaattgagaaaaaacaactccaaactgcatgccgaaaaagatagataaaatcccgattaacatattctccataaaaacaagacgatgtaattgttttcttgatattcctaaaatggtcaaaacaccaaattgtttttttctaactttaaaaaaagtaccaatggaatatagtaaaaagaagaaagagaaaaatacaattactacttctgaaaatatcattaatcctgaaatttcagaggtcatgtcaaagttttgtaatttcggatggaataagtaaacagcaaacgaaaagaacacagcaatggaaaaggaactacttacaaagtaagcaaaataagctctcgagttgcgcgtgacgtttttaaatgcaaattgccaaaatgtcatagattatacctccggctagaagatatagaagtagttgtattgcaaaaaatgtatgagagtgtgttctcatacattttgcttgcatatgttacgatcatgcttcggtcaccttctccgtatgttctgcttgattatttgcagcgttgtggaagatgattttaatcgtcgttcctttaccaacttcagaatctagtttgacagagtgacctaaataatcacaaattttacttacaatataaagccccataccagtagattctccgaatgcgcgaccgtttttcccagtgtaaaatggttcaaatactcttcgaatatcttcttgcggaataccaacaccttcatcacgaacttctaaaataatatcctttccgtttcggtaagcagataagaaaactttctttccgcgctcaccagagtaacgaacagcatttgtcattaactgatagatgataaattttagccatttcgcatcagaagcaacttttaaatcagaatggacttctaaaacagggaagacaccattacgaatgaatagttcttttaatccgttaatattttttgttaccgtatcttttaatgaaatcgtctcaacatggaaatcttcatggaagttatttaacctagccatgtataaagccatatcaagcccttggtttagacgctctaattcttttttaaactttggaattaaatgctcgtcttccatttctagcaccataagctgcataacagaaacaggtgtcttcatttgatgtacccagtggttaatgaataattgatgttcttgttgttttacttcatacgattgtagttctttttggaagaggcggtactgcgtacgcacgagttcattgacaccgtgaggcatcggagcagttgctctttcaataaacgcatcttccattttttctggttgctcgcttaatctatggtacattctacgattgcgaacgtaacggtaagcgaggaaacaaataaataaatataaacttaaaacgacgaaataaaatttattgttttgaaatccatctactgcatcataaagaacgaaaatgataccgaagtttaaaacgtacagtaggaaaaatgcaaaatgatcacgtaaaaatagcttcatgcttattcactccaagttgcgttaaagcgatatccaagtccacgtactgtttcaatagagttctcaataccaagctcattaaactttttacgaagacgcgtaatgtttacgtttaatgtattttcttcaacgaagctttcgtcatcccaaagcgcagctaataaatcttcacggcttgctgtacgagggaatttagataataacatttcagctaaaatagcttcttttttcgttaaaagaacttgttcagatccgaagtgaatttcaggacgttctgggaatagttttaaaccttctacttcaacgatacgttcagaaatatttggtgcataatcaccgtaaatacggcgtaattgtcctttaatttttgccattacaacgtcgtagtggaatggttttgtaatgtaatcatccgcaccgctttcaattgccataatttgttccatctcaccagcacgcgctgaaatgaaaataattggacaagtagattcatgacgaatttgacggcaccagtagaaaccatcgaatttcggtaagtttacatcaagtaaaacaagatgtggtttcacagcgttaaacgattccataatatcatcgaaattctctgcaacaacagcttcataaccgtacttctgaatgtgagattgcagtaatgatgaaatatttggatcgtcttcaacgattaaaattttatacatatgtatattcctcctcagaaaaacaattgtagctatagtgtatcatgtgtttcaagtcttttcattatgttgaaagataagctagtaaacagtataggttaaaagtgagaaaagtaaaaagggcctcgtatataattgacaatcaactgaaatcattttaacatttagataagtatctaaatgtctaattatcgaaaggaagaaagacattgaatcaagcattcaaagcattagcagatccaacaaggcgaaaaattttagacttattaaaagaaggtgatctaaccgctggtgagatcgctgaacatttcaatatgacaaaaccaagtatttcacaccacttaaacgcacttaaaaatgctgaacttattcaagatgaaaagaaagggcaattcgttgtgtactctttaaacacaacggtctttcaagatttgttgacttgggtgtttacatttacgaataagggggaagaggggaaatgagaaagcatatatttccgttactattaatagctttaacgattattgcatggtgcatcgcgtggccgcatttaccgggagaggttccgagtcattggaatgtgtctggtgaggtagatgggcgtatgtcaaaaatgggcatgatgattttggatgttgcagttatggtttttatatatgctttattgactttattgcctaagatagatcctaagcatgagaattatgagaaattttctaaagggtataatgtaataaattatagcgtattattcctattatttttagtaagtatcattggaattggagctggattaggttatgacattccaatgaagagtacaccatatattcttgttggtcttttatttataatcatcggaaactatttaccacaatgtaaaccaaattactttgtaggtataaaaacaccgtggacattaagtaacgaggaagtatggagaaagacacaccgttttagtgggaaggtgtttgttgtattaggagttattatgattttaagtatttttgctccggcagcgtggaaaggtttcctaatcattggcattattaccggtgcagtaggattaacaatgggatattcatatattgcttataaaaaagaaataggggcttaataaaaaattatgggggagagaggatgaaaagacacgtattaccatggagtttaattattggcattgtaattggatggtatattgtatggccacatttaccagaacaaattccacgccattataatgcagcaggagtagtagatggatatttttctaaagtagaagcaagttctgtttcaataggaagcatgatgttgctgtatttgatatggctagctcttgggtatattgacgtaacgaaagataagtataaacagcatgctaaagtcctttccgcaatccgttatgctattcttttgataggattcggctgtaacttatttgcgctattagcagcgtctaattatattgcatcgggctcaattgcatttaattttggacttggaacattgtttcttgtactaggtaattacatgcaacaaacgaagccaaacgggttagtaggcattcgaatggactggacattagaaaatcctgtagtttggaggaaaacacatagatttgcttcgagggtatttgtaataggttcactttgtatatatgccggggctttgcttccagatccatttaatatttttatagggattggaatcatattaatatgcattatcgtatcaacaataaagtcatatagtatttataaagaagagttgaaaatgtaaataaagctgcttttccttttagggaagagcagctttgttttttatcacttcttcaaaaccggtatccaaatttcacttttaaagtttggagaagatatatctttctgtttattccacaatatctccggtccttccgctagttcatagttcgaagaagggaaccattcagagtaaatacgtccccatacattttgtaatgcatcaggaaatggaccgacagcttcgaatatagcccatgttgaagcagtaacttcaagctgtttaaactgctctggacaatcctttgttgtggctactccaatgtagtgatcgagttctcccttttcctccattcttccttcagaaaagttagtagaagcactaatgattccagtaggttcaatgtttgaaagggactttaatgtttgaatagaatctgggtttaaacttttccacatagaagcaatttcttcatttacaccgttaaaaacgattggtactcgttttgtaatacctataattcgaaatggctctttttcttcaattcgatagttcatttcatttcctccttgaatggataattggaaggtcattggtgaataagccttcaaagaatggctactatttcgggcttcagaaggtgttataccgtgcaagttttgaaatgcacgagcgaatgaatctggtgagttgtacccatattttatagcgacatcaatgacttttgcatcgctattttttagttcaaaggcagcgagagtaagacgtctacagcgaatataatcagacagtgatatacctgctaaaaacgaaaacattcttttaaagtgatactcagaacagagagctagcctcgcaacttctttaaaatcaatttcattcgtaaggttatcttcaatatagcgcattgcagtattcatatttttaagtgaatccatattatgacctcctctgtacatagaatagcaggaacgaaatagctccatccgacatttcgtgcacaactttgtaggggacatttttaaccttacaaaattgtaatgttcctgtaaggagaatgaatggatggtatgatatcccaatgttatagtaacaaagtacttttgttcagtaggttaaatttttatatctttacttatgcgtcttacataactgtcatgtttgtgtaagaaacatcgatagtggcaagagtagagagtgtatatagttgaaaatagagaatagaagaaatgagggatgtcgagatgaaaacagtgttagaagcaaaaaatattgaaaaagtgtacgacacgggtgggaataaatttgcagcgttaaaaggtattaacttacaagtaaaagaaggtgagttcgttggaattatgggaccttctggttctggtaagacgactttactaaatgttctttctacaattgataatgcgacgaacggtgaaattttaattgatggaaaagatattgtaaagatgaatgatgataagttagcgttattccgccgtgatcatttaggtttcattttccaagattataacttattagatacgttaacggtgaaagagaatatcgctttaccacttgcgttatcaaaggtgaaagcgagtgagattgatcgccgcgttcttgaaatctcaaagaaattcggtattgatcatattttaagtcagttcccatatcaagtatctggtggacagaagcagcgctgtgcagcatcgcgtgcaattgttacgaatccaagtatgattttcggagacgagccaactggagcacttgattctaaatctgcaacagatttacttgaaagtatgaagtcgttaaatgaatatgataactcaacaattttaatggtaacgcacgatgcgtttgcagcaagttattgtaaacgagttattttcattaaagatggtgaactatataaagaattacatcgcggtgaatcgacgcgtaaacagttcttccaaaaaattgttgacgtaatgtcttctatttctggaggtatggctgatgaccttatctagcattgccctccgcaacatacagcggaactttaaagactactttgtatattttgcatctatgatttttagtatcgttatttattttacatttaaagcactgcaatataattcacaaatggaaaaagcagcagaagcttcaaaaaaaattagcggagcgttccaagtttcaagtgtgatgcttatcattttcgtagcagtgttcattatatattcgaacggattctttacacgtaaacgtaaaaaagaagttggcttatattcgttattaggtatccgtaaaagacaaattggtaaaatgctcttttatgaaaatatgttaatgggattaatgtcattagtaattgggattgcgatcggtagtgtcctttcaaaattattccttgagttattagtaaatatgatgggattaaatttaaacgttcattttgaagtaccgatggctgccattattgatacagcaattattttctttgtgattattttatatacatcacttcaaggatatcgtttaatttatcgctttaagttaattgaacttttccgtgcagaacgtgaaggagaagcaatgccaaaaggatctgtcattatggcattaatttcagttttcttaatcggttcaggttattttttagcattaatgtacatgaaagcagttatgtatgcagactttatggtcgttgcattatatattttattagcgacagtagcagggacttatttactgttcatgttcttcacagtatttgtattgaaacgtgcaagaaataataagtcagcattttataatggtatgaatatggtaacgacatcacagttactatatcgtattaaaggaaatgcgaaatcactggcgacaatcgctattttaagtgcggtaacattaacagcggttggtacgtcagttacgatgtattacaacacatttacgcaatcaaaagttgctgcgccgtatagttattcctatgagaaaaaagatgcagcattagataaaaaagtaaatgaaatacttgctggagagaagaataatcacccagtcacatatgaatcagaagttgaaatgattcctgtgaagggaacatttaaaggtgaaagagctgatcaagttctgaacacacactataatgttacgaatcagtaccagcttatttctcaatcaagctttaatacacttgtgaaacatttagatgtagaacctgtaaatttaagtgcgaatgaagctttcgtatatgatagcttatatattgagaaacttgattttggtcctctttatacaggaaatacagctgtattccctgttggaaacgagtcaaaagaattaaaaattaaaggtgtaaataatagaagccttacaaatttaaatgaactatttgtaatcgttcctgataaaacatatgagcaagtgaaacaagtaaatgaaacgcgtactgtaaaaaatattgatgtaaaaggtgagcgaaatagtaaagagttaacagcaaaattagcaagcattatgccagctggagaatcagaagttttaaaaccatttaacgatttctatacaggattccaaatggggcttgaaacaacaggcttaatgatgtttattgggttattcttaggattagtattcctattagcaacaggctcaatcatttactttaaacaattaacagaagcaagtgctgaccgtgatcgctacgttgttcttcataaaattggtgtaacgaagcaagagatgaagagagctatcgcaaaacaagtgagctttatctttgctattccgttagtaattggtattttacacagcctatttgcactaaaaggtttatcaaatatattaccatttgaaattatgattccgcttctaattagtatcggagtatacggcgcgatttatattggatattacttcttaacagttcgttcttattataagatcgtgagtgcgaagtaataagggacagctatcgctagaggcgatagctgtttttttattcttcataaaatcttaagaaatctcctcaatttttgttaagaaataatagttatacttagaaacaagttaaaaactattgaacgaatgaggagaggtttatatgcaactcataacattcttacatgaatttattaaacatccgaaacatactggtgcaattgcgccaagttcaaaaatattagcaaagaaaatggtagatgtaattgattttaataaagcgaaatgcattgtagagttaggtcctggtacgggagtctttacgaaagaaattatgaagagaaagaagaaggaaacaatatttcttcttattgaaattaatgaagtgttttgcaaggaactaaagagaaaatttaaagatgagcagaacgtcattgttgtacacggttcagccgaaaatataaaaaagtatatagaagatctcaatatagaatgcgtggattacgttttatcgggattaccttttacctctttaccagaagaagtttcaaagcgtattttaaacaatgtaatggaagggatacatgagaatggtgaatttattacatttcaatattcacttgtgaaaaaaggatttatacagcacttctttcctgaaattacgctagagaaagtgtggctcaatttcccaccagcgtatgtctttagctgtaaaaaagagctaaggagagcatatgcataatggaattacatgaattattatcttatattgaacaatacggttattgggcattatttttctgtttatggttaggtattattggtatgccaattccagacgaaatgatcgtaatgagtggtggctttgtatcttcactagggatattaagtgtcattcctgcatttttattaacatatttaggtgttgtatctgggctttctttaggttatatattagggaaaatatttggtacgaaagtacttgataagctaatgaaaaagaaaaaggcgaaatatcttttgaaatctcaacaaatggtagagaagtatggtcattatgcgttagtcacaagttacttcataccagttgtaagacatatcgtaccgtatttagttggaatgaataacatgccatttaagacgtatgctttgtattcttatacgacaggatttgtttggacactcgtttactttgtgctcggtgctttatttggacaacacattgaaagtattgtagcgattgcgatagaatatggcttgtattttggcgtgattgtttttattgttacaggtattctttatttatatagacaaaaaagaatcacactgatgagtaaatagaagtaaagaaagtttcttccagtatgaaggaaaagataggattataagtataaaattatctttatttaatggtaaaatataggtaagtagttaagggaggaagagcgttgtgctactcatttttagccttatcttaattggaattatgtgcagtatgaaaatagtatctttacacatgatagaacgacaaaaggtagaggaatgatatgtatattgtccaaaatgtgatacaaaaattagaagaggaaattcagctcctttttgttcgaaatgtaatttaatatttttaagtaaacattaatccacctagttctctttcgtttgcttattagctaaaatggattatgaataacaatagtatgtaaacgaaaataaatataaatgtacacatggagtgttatatttggagattttaatcatagtaggatgcctaaactgtatggatgttaacctttttagagaaagatatcccagctaatttagtttggaagattgaaagaatagattgaaaatagatgagaagtggagtgcatatgatggagacacaaatcgttattggagtacctggtttatggaaagatagaacagaattaatacaagaagttgtgaataaaagtaactatatattagcgggaaatgttatgcaccataaggagaaagagattggctttgaaattgatatatatgaacaagggattgagtatacgaatattattgaaggatatcccattattatgaagtctttcgtagagatggattgagaagttttgagggttttattacctgatgacagggggattcttcctactaggccagagtgtgatgaatgttataagactcaattggatagtattgaggaaatttgataaaaaatagcttgaaaccatttaagctatttttgaattattacatatgctgtaaagtaggttttcgatttgtagtaatatctgctactgaataacgcttcgttttattagtgccagttagcccatttcgtatttagcatatttttttcttcttctgaaattatattgtctttataccagggtaaatgtttacaggtgaaattatcagctacccttacggcattataaaaaccgttactaataaattttttattgtaaacagcaaaagttgtatcaattccagcgttgaaaactttaggtttattgtatttagttataggaaaaagccaatactgcatttcccattctgttactgtacatttttcatttgacatgagctctctgttgaaattagaagtaggtataatgtctaaagcaaggccggctttaaagagtgaaagctcgattgttaactgctttaaatactctaaaaagttatctgacattttttcattaaaagataaatcaggatcagttacagcaaaaaaatctggaagtaaatcgaaaatataaggaacggcaaaaaaacgtggtccatagttggcattatttttcactaaattatatttagttgatatttgctcataaaaagcaagcaaagcgggagcggttgaattattgtcccaaatccatatatcttcactttttatctttttgttttctaattgttttaacatatttttcacataagtaaggttattgaaggctattactattataggaatgtttgaattatattttaagttttctatattagagagacttagttcgttcttacattcgaacacgatttataacacctccgagcaaaaataaaacacactgcattagaagcaacaatattccaatatatgcgtaagtaagagaaatggaatcggtgtacggcctatatatgatggaagtaggaaaagcatttttgttaagatagattgagtatacgaatagtgatgaaagaggaatttttctagctacatgagagcacggtaaacgttagataatattaatgaaaaggtgatacatgtgcaaaaagagattttaaggttattagataaaaagcaaagtaactatgaatttcctgcctttgataatgaatatatggatatttcacaagtgaaattctctcttttctttaaagatgctaaggattggctaatggtgtttcaaattgtgggtgtaggttcattaggtgtatgtaatgatattcaagtatatggcgatagaattactcattcaatgggtgatgattgcattttacaattaaataatggcgattatgagttgtttgatgatgaaggtgaatttataccgaatatttataacggcagtttaaaaattcgcgagcatcattttgaatatgaatttacagaagaggattatataaataatggaatagaagtacaaacgacagagcattatccaacatactttatgcgtatgctcgctactaatgaggaagctcaaaaattattgtggtgggataaaggagaaattttagaagagttcggtttagaaggcgactgggaagtagcgtatgaaacggaagaatggaaacatgttgaagacgaaaaagtaagtgaaaatgaattcttccaatcagtagccgctgcaatagagaagaaagatccaagtgttattgtgaatgaaaatgctaatacgcattggagaaattgggtagagtttgattgtgactgaaaaggataggagaaagaatgacaaatgaaaagaagaagaaaatccggagaaaaagtacaaatgcatcgttttgcactacctctatgctacggaagtgaagcaccatattattattacgaggtagcgccccatgaaagagaggaacgcttccatttaacatcagatctttgtgtaatggatggtgaacattattttattagaggatgtttagagattcctataattgactaccacaaaaatttcatatggactgtgtgggtatcacttagtaaagaaagttgtgatgaagtattagaaaagtgggatgaaagaggcagggaaaatagtgatctttattttggatggttatctgtagagataccagtttatccagaaacattaaatttaaaaacaaatgtacatataagagaagtaggaacggcaccgtatgttgaattagagccaaccgaccatcctttagcgatcgaacaaagaaatggaattactttagagagagttaaagaaatagaggaaatgatccaacaatataactagattagaagagaaaaaacgagtgctagcactcgtttttttattacacaaccgcaggattataaatcatcgtaaagtgtcctggtaataattcaatgtgacaaggtgtatgaagcgagttttctccatctgtatctacttctttttcttctttcgtttcaatatgaatggatttcgcttttacgtggaagatgtcattttcatttgagtcttcaaatagtttctttccgatgtaatctttaaatgcttgaatacctgttgatttgactacgaaaatatcaagtgttccgtcatcacattttacgttcggaataaaggatggaataccaccaagatattcaccatttccaaccatgacaaggacagcttcgtcttcatatacttgtccgtcataagtaatttttactgggaatgtttcagcattttttacagttcgaattgtgcttaaatagtaaccgattttaccaagctttgctttttcttctgcatcgatattgtttgatacttcagatacgagtccaatgccccagaagtttaagaaatgttgttcatttgcttttgcaacgtcaactggttttatatgttcttttgtaataagttttgccgcttctgcaatgttttgcggaacaccaagtgtgcgagagaagtcgttgcaagttccacctggaatgattgcaagtgtaggtctagtttcgagaggtgctaagccatttgtgcattcaaatactgttccatcaccaccaaagacgataattaaatctactttactagcaaactcttggcaatattttgttgcatcaccttgttttttcgtatgaaggatatgtagatcaggaaaagctgcggcaagaggtggtacgattttcgttaaatttgtatgtaagtcaccttgaccagctttcggatttacgatgaggagtactttttcaaattttgtctttgtcatatttcatctctccctgtagtttgtaatggaaagaaaggagctgttcccatgtattttagaacagcttctccctattaattgggtgctaagattgtcagttattgtcggtaagtcgatatattaaaaaaatcgccgatatacattttatgtactatcgattttttaagttatacgattattccgttacaactgaagcaatgaatggtaagttacgatatttttccgcacagtcgataccgtatccaacgatgaattcgtctggaatttggaagccaacatattcagctgttaagtctactttacgacgttctggcttatcaagtaatgtacagaacttgagtgcttttggtttatgcataaagaagtggtcttttaggaaatgaagtgttaaaccagaatcgataatatcttctacaacaattacgtttttcccagtaatgtttacgtcgatatcttttagtagtttcacttttcctgttgtttctgtttgatttccgtagctagatgcagaaataaagtcaattgttacatcatttttgatgttacgaattaaatcagcagcaaatacgaatgaaccttttaatactgcgataactacgatttcttctccttcaaagtcacgttcgatttgaagtgctaattctttaacttttgcttgtaattgttcttcagaaattaaagtgtcttttatttcaatattcattgtaatcctcctacagtgtaaaacttacgaacatttcgactgtaaaggatagaatagaaaaagtcaaaggagatagtaattttttacaaagataacgacaaaatcatctgatgatatgatatactaagtatattaagaaaacgcttccataaagggtgaatatgatgaagaagaaacagtacacaagtgtaacatttataaaagcattacttttaacaattgttcttggcctgttggcttacgtaattgatgtacctgtgattcgtatttcattaattggaatgactttagtgttaggagcaatttcgcatggtatgatgtcgcagctaaaagaagctggacttgatgatatgagagatcatatagataaaaagtgagaaaccttcattatatagagtgaaggtttttttgtttcttacaaaaatgtaaggtagttgtaaggcaaatcgatagttgcataagagcattttggataaactatgggtgtaaggtaaaaggcaagcatattttaggtaaattaagttttaggcactctatatgtgaaaaaggagtaggagggcatggagaaacgttggacgaccttttcttttttagcgactagtaacaccgtaatgctagatggaaaaatggattttttgcacttgtttgatcgtgaagatgatcattcttcttctaaatttacaatgaaatggaataaatggagcgagagttgtaggtttgaagaagaggcccctaacgaagagcaaaagattattttaacaaaccctattaaagcgtgggttgttcaacgtcgtaagtgtaacgtcaaaaatcacttcaagaaaactgagccgagacaattagttatcgctccggcccgttctacttccaaatcacgcgaaagtaacatgtaaataattgagacacacacccgaaaaaaacatcgtacatattgcgatgtttttttctttttctacaatgaaatctttaaatgaaatatatttcatctgcatcttatatttatatctcttgcttattctagtaatacatccgatgcgagtagatgtgaataaaatataaggagagagtgaaaatgaaaaagaaactattaccaatttgtgcaatggcacttttaacagtaggatattcttcagtagcgagtgcggatactggaacagtaacaaaggaagaagaagcgcaagtacaacaggataaagctaaaaaagaagaagcaatcaaggaacagcaaaaaagtgaaatagagaaaaagcaagcagcacaagtacaagaaaaaaatgatatggctaaaaaagaggaaacaataaaagctgagaaaaaaagtgaagaagagaaaaagagaatagcgcaagaacagttaaaaaacgatatggctaaaaaagaagcagcgataaaagccgagcaaaagaatgaagtagctaaaaaagaagaagcaaagccagttgtacaaggtgaaaaattaccaaatacagcatcaaataatgtagcaatgatgggattaagtgcatgtcttgtagcggtaggtacattatttggtttgaatcgtcgcaataagattaaagcgtaaataaaatattttcctataaagaatgggataatttcatatattaaaaatggtaggttactcctaccatttttggcatggaggaatgaagaatgaagttactcaattatatcggtatcatattgatggctatagggctattcatgggatcctattatgctgtggaatggtataaaggaagaagctctgccgggcaattaacggcagaagaaataaagagccttaaaaatatacaagatactcaactttctcatgaaacacctgtaacttctcaagtgccttcttctcaaacagaacataaagaaggagaaaaggtagcgatgttaaacataccgaaaataaagaagaagttttctatatattggggagcagatgatacgactttgaaaaaaggagtgggtatgttcgttagtgatttaacgacaactccatctggagggggacatactgtactgagtggacatcgagatactgtatttacagatttagaagagttgaaagaaaaggatacccttgttttagagtatgataataaaacgtacacatatgaaattcaaaagacatggattactcatgcggatgatcgtactgttattataaaaaaagaagaaccgatattaacactgacaacttgttacccatttgattatataggggatgcaccagatagatatattatcgaggcgaagttaactggcagttattcaaagtgaaattatagtttctgaaagcgagagggggatatataagttatgtcaaaaaacattttaattgttgaagatgaagacatattacgcgaaatattaaaagattattttttaagtgaacaatatgtagtgtttgaagcgagggacgggaaagaggctttagttgtatttgaagaagaagaggttgatttagttattttagatatcatgttgccagaactcgatggatggtctgtttgccgaaggattaggaagacgtccgaggtgcctattattatgctgacggcgcgtgtagatgaagacgatacgttacttggttttgaacttggagcagatgactatgtgacgaagccgtatagtcctccaattttattagcaagagcgaaacgattattagaaagtagaaaagcatcgaagaaacctttagagaacgaagatgatacgttatcgattcatggcatccatgtccattttccgtcgcgtactgttactgttgatgaggcagatgttagtttaacgcatacggagtttgaaatattggtgtatttcatgaaaaatcaaggaatcgttttaacgcgagagcaactcatttcaagaatttggggatatgaatttgctggcgatgatcgaacggtgaatagccatattcgtaatttaagaaataaattaggagagaaagcaaagtatattacaactgtagtacgaactggttataaatttgaggggaatgtatgaagaaaggaattgtactaaaattatttactcttacaacagcattatgtatgttgattttagcgacgatatttattggacaaacgatattttttaaacaatattatgcgaatcgaaaagtggaagatattaaagtgaatttaaattcttttgagaagaattatttaaattatgcaggaaatgcagaagaaattcagaaactagagcaagactttttaagagaaaataatacgtggattacgacattagataagaacgggaatttaaaacatgcagatgatttttattttgaagtaacgatagatcgtaggcaacaaaagagctttggacaacaaatatttaaaattcccttaggtaatctcgtcaatatagaggaaattgataataaattatcagagcagtttttagggcaagaaatttatttttctggagtgagaaaagaagatagttttattccattctctttttctttatctaagcagaatttaagtggatctaataaaccgttagaaaaagcatttaatgagaaaatgagcaaattaaatgaggagaaaaagagagcagttgaggaacaacttgttaaggaaaagaaaccagctgttcaggagcaagctgctcaggaattaggcgtttacataggaggacgtgttacaaaagtacagttaccagatgtaaaaggtcctgtgaatccaatttataaaaatggcatcttcttagatagcataaaagaatttcaaactaatttattattaaaagagagcaagcccatacaatatacaacacaaacaatggactatgaaaaaaatgatattaaatataaattattaatcaagccaatagaaaaagacggatcagtaacatatatttatgcgatggcttctttacagcccgtagatgaagctgtacaaatggtgcaagattattacatctatatcattgcatttgtagtcgttcttattttgttagcttcgttctattactcaaaacaaattgccaaaccgttattaaaaataaatgatacgacgaagaaaatagcacaattagattttacagaaaaaataccgattacttcaaaagatgaaattggagatttgtcgaaaaatattaatgtgctatcaaataaactccattcacatattggacagttagaagaagatattgaaaaggaaagaaagttagaaaatacacggaaagaattcatttctggtgtttcgcatgaattaaaaacaccgctaagtattatgaaaagttgtatttccattttaaaagacggggtagctgagcataaaaaagagtattattttcaagcgatggagagagaagtagacaaaatggatactttaattttggatatgcttgagctagctaaatttgaatctggtacatataaaatgaaaaagtctgcgttttatattgatacagtaattgaagatatatgtgaacatctatctgtggaaatagagaaaaaagaacttcatgttcataaaaatatacattcatttgaagtgattgcaaatcaaggccggattgaacaagtcatcgttaacttcattacgaatgccatacgttatacaccaaataaagaagatattattatttctgcaatagatgagaaggatcgtataaaagtttgtattgaaaataaaggtactcacattgaagaagaacaattagataaaatttgggatcgtttttatcgcgtggatacagctcgtcagcgttcacaaggtgggacgggactggggcttgctatttctaaaaatattttagaattacacgatgctgaatatggagtgaaaaatacagaagacggtgtattattttacttttacttaccgaaaaaagcgtagataatgcatgctacgctttttttaatttattttcatattatctttacctaatctttatttttaagcgatataatctggttagaaaatgaggttatgtaaggagtcgatgaaccgtgcatagcaattggctaagtataatggtatttattttcttttgcgcatttattgtatttttaattaatattacgatatgaaaaaagagcgctcattaagcgccctttttttgtgtattcatttgataagcactgatgcttttgaataagcgtggggaagtgaggaataaaaatataagtaaaactgtacataaaataaaagaaccaagcattgtacttccatttacgattaatgaatataacacagctgattgacctttcggcgcatattgtccccagaaaataataccggcaataaagtgacagaaatagcgagcaaagctaccgacaaatgtagcaaggataatgtaaacaaggattttcttaccatggttttgttttgctgaaggtttttcattgcgactacctaaacttgaatgttcttcactattttcattagacgttaaaagtgctttttgaattggacgatagaataagccagcaaatccgataaaagcaaaggcaatgaagtactcaatgaatgcttgaacaggtgttaaaatataagcatcccccacgactatttgtaatagtccccaaactaaaccacctaagaaagctgatttaaagccccagcggtaagcgataataaaaataggaatcatagcgaatgagatagaaccgcctgttggaagtttaagtgataatggtaaaatatcgataatcatggcgaaggctgcaagaatagcagattcgatcatcgcttgtaaattagtgttacgcatgttgtctccccctaaatccaagttgtacaaaaaagaatagatatcataggaggatacgaaatacgtaaataaaaatgaggtatgtatttcggacgtttgcacaatccctgcgttagcattaactaacaggttcgaagggtcggaacgaagtgttccctctcagcggcatggctcccccagtgataacgagattctttatttgctattgtttattgtaagcgaaatggatgagaatggcaaacgaatacagtatgacaataattgaaatagaattgtagcgaaatgttaataaatatgaagcaaaagggtatagtacaagagaaattgggtgtggtataatttttttgaaaataattatcattctcttctgagggggaaggttatgagtttagtagatattaaaattggagagaaagtgttagtaaaaagtattcagtctttagatcagctattaaagcgtagactagctgctttcggtcttgctgaaggaagcgaacttcgcctgaaacagaaagcgatgtttaaaggtccttgtacattggagtgtcgtggacagttaattagtattcgtcattgtgacgcgaaaatgataaaggtggaattagcgtgaataaggtagctttgctagggaatccgaatacagggaagacatcattatttaatgcacttactggttcttatgagtatgtaggaaactggagcggtgtaacagtagaaaagaaggttggtaaattaaaagatagacaaggaacattaattgatttaccaggtgtttatgatttaaatccagtttcacgtgatgaaggtgttgtaacaaactttctattaacagaagaatttaatcatatgttaaatatcgtagattcctcgcagtttgaaagaaatatgcatttaacgttgcagttacttgaatttggtaagccagtctcaattggtttaaacatggttgatgtggcgaagcaaagaggaattgtcattgatgtaaaacgattatcagaactattaggtgtaacagtcgttcctgttgttgcaaggagtggaaaaggctgtgaagaactgcttacgactcttaaagaaaatgacaaaaaagagaaaaagccattccttatttcatatggtgtacaaatggatgaaggaattggagaagtaattgctcttttagagacagtgaattacgagcatccgagatggttagcacttcaatttttaagcaataacgaagtagtagaaaaagaaatgaaagcattaccaatttataaggaactcatagccattcgatctcgcttagaaggaaaacttgattgtacgttagaagagcacatttacaaaactcgtgaagcgtatattgaaaagttaaaaacaaatgttatgaagcatgagaaagaaggaaaaattcctttttcagaaaaaattgatagattaattacacataaaattttaggacttccaatctttttagcagttatgttttttatttttcaggttacgtttacgtggattggtacacctttatctgatatgttagatgagttttttggtggccagcttacggattgggtgacggctggacttacaagtattggagcttctcattttattcaagcactcgttacagaaggtattattgccggtgttggtgctgtattagtattcgtaccacaaatctttgcactattctttttcatttcattattagaagactcagggtatatggcgcgaattgcagttgttatggatagaattatggagtttttcggcttaaacggaaaagcttttattccgatgattatcggttttggatgtaacgttccaggtattatggctgcgagaacgattgaacaggagaaagaacgtttacttaccattttagtaacaccatttatgtcttgttcagcacgattacctgtatatgcattatttgcgggcgtattcttcccgcatagtcaggcgactgttgtattttctttatatgttgcagggattgttcttgcgttattagttacaaaaattatgtctcttacgattttgaaagcggaaaagtctattttcgtaattgaattaccgccttaccgtgtgccacaagcgaaaacattatggctgagcacgtgggagaaaggaaaaggatttgttcgtaaagctggtacattcatctttggtggttcggttgtcatttggttattaaactatgcaggtccatcaggatttggtgttgatatgggagacagttacttagcgatgattggtggatttatcgcaccgctattcgcaccgctcggctttggaacgtggcaagctgcagcatcccttttaacaggatttttagcgaaggaagttgtcgtttctacaatggcaattatttatgcagttaaagaagatgtgcttggaaatgtaatgggagtacattatacagcattatcagcttatgcatttatgttctttattttattatatgttccgtgtttagcgacggtagctgttattaaacgtgaaacaggatcagcgaaatggacgattttctcagtcgtttatccactcgtagttgcttatgtattaacgctcattatatatcaagttggatccttactcggattctagaaggagatgtattacgatgatggtcaatattataattggagctatcatttttggttatgcagcatacacgttagttaattttgtaaagagaagtaaaaagggaaaatgcgcagcatgttctttaaataagtcatgtcagtcgaaaacttgtagtccagatatggaacaagttgctcataataaatagaaaaaagctttgcgaatgtcgcaaagcttttttgttttactttttaatttttacaagttgagaagcttcgacgccgttgtaaccagggaattctttacttgggtctttatcaaattttaatacacctacagatttttcatcaccttttacattgttgtaagttgcgtcatcgacaatcgcatacatatctgtatatgcacggccacttccgataattgtgttgccttcatattttaatttcgctccatcaagtgtagcattttttactttttcttttgcaaataatacaccttgttctgttgttatagctggtaatttatcaagtggtttcgtgttgtctttttcatcaactttgctaagtaactcttttttcactagttcctcaccagttttcttatccattacaagaacttttttaccatctaatgttgtcattttcattttatagaagtctttttctttcacttcttttttgtttttatctgtaatttgctgaacttgttcttctgagccgtacagtacaaaaccgttcgctttctctcctaataaagaacaacctgataatgctccaagtgaaattgctgctgctaatccgattcctactaattttttcatgatgatttctccttttatatgttttatattaaatacaatttttgtattattgcttacaagtgaagaagcttgtttgttgcttctggtattagtgtataagaaatattagaatgcaactatcgagttagcttacagtaacattacacttatgtaatttagtgaaattgcacaaaagtaagttaatttcaaagaggaataatgagaatatattagaaatacaatattgtatatagaatgtcatattataatggatgtattttggaaataacatgtaaggacatattagttttgttataataaacacataggctgtaaaaatgaatattctttactgtaaagggagatttttcagttttccaagtagtgaatttgaaatatgaggtatatcataggaggaatttagatgtctgtatttaaacgattaagagatttaacaatgtcaaatgtgtattcgttaattgagaaagcggaagatccagttaagatgacggatcaatatttacgcgatatgcaagcggatgtacaagaagctgagaaaagtgtagcagctcaaatcgcgcttgagaagaaattcaaaatattatttgaagagcaagaagcacttgtgaaaaaacgtgaagagcaagctcatatggctgttcaagctaataacttagatcttgcgcgccgtgcactagaagaaaaacaaaatgcggagcaaaagatgaatgagtataaagcaagctatgagcaaaataaagctgctgctgataacctgcgcctaaagctagaagaaatgcgtaagcaattaaatgagctgaaaaataaacgtgagacacttgtagcgcgtgtaaatgcggcgaaagcacaaaagaatattaatcaggcgatgtctggatttgattcaaactcagcaaaagctggtttaagccgtatggaagagaaagctcttcaattagaggctgaagcagaagcgagcggtgaagtttataagaaagaaaaatcattagatgatgaattcgcaagcttaaacaaaaattctgctgttgacgatgaattagctcgtattatgaagcagtatgagaaataatatagaatagagacaaatgaaccgacatgtctaaatatattcatgtcggttttctattatatttagaggaggttttgcaatgacatggacaaatgtattagccatgcttgtatggactggagcgagtgcagtacttttatttgcaattatgtgggttgattcaatttttacaaaatacaatgatttaaaagaaatcaaaaatggaaatacagctgtaacaactcgttttattatgaaattatttgcacaagggtacattttatctcaatcaattacgaaagcaaatgacttatggcaagcacttcttgcatcagcagtttctttcgttattttattagtggtagaaatgtttatcgaattcgtattaaagaaaatgtctggtcttgatttagaagaaggtacgaaagaaggcagcgttgcacatgcgatgttagctggatcattacatattgttggtgcacttattttaggtgcttgtttataaagagaaaaggaggggtaaatcatgagtttatttaaacgaattaaaaatataatgaaaagcccagagccaccgaagccggaaaagagtcttttaacgttagctcctggcgatatgattgaagtgtcattagttatgtatgaattaattgggaaaacgagtatgcattcgcgtaaggaaattgttttgacattgcaagatggaaaagacattcgttatttaaaaattgaagatcgtgaaaatacgtattacaaattatatacaccaattgatggtcgcttagattcaattgatgaaattccgacgacaattgaaatggatgataccgagtaccatatggaagaacaatataacggacgtgttgttgtgatgggaaaaactccattctcagcttcagaagaacagtacgtatgggaattccaatcagacaatcgaaaattattgcgtattgaatggcaaaatggtcgcacaatgatgtatgagggagaagcaatcattcctgctgatgtacaaattataagagcaacgtaagggggcgtaatcatgtcaaaccgattgtttaccatgattaaatcgtttgtaatccctatacttgctatcgttatattacttgttgttgctggttatgccttatcaggttgtcaaggcgggcagacaaagtcgattcaagaccgttatccacttgaatctgttgccaaggaaggtaaacaagaatcttacgtgtatagggccgccaatcggtcagttcctgaagtagcgaaggaactcattaacgaaagagaaccgaagcaagcatctaaagaagacgaaaatcaaatgttcctcgtttattctgataagatttataacctgcaaaaggataaagagaaaccatctgatacgttaattgaaataagtaataaagaatttgtccgtcaaaattaccaaccgtccttcttgcaaggatatattatgggtagcatattaaacgatatattcggttcaaaaagatcatcatccggtgattaccgaggatataatgacagacaaaatcatcaaccagttattccagaaagaccacctacaaaagaagaaaagaaaaccccacctccaattacgaaggaagggaaagggtctatcattaagcgaggcgataatgtagattcgaaaccatcagtaggtgataagggaagtattactgaaaaaggaagtaatacgacgcccccaccttctactggaagcaaggggaaaattacgaaaacaccaggcggttcaagcggatcagatgtgaagccaaaatcatctattaaaacgccgccaaggaatacatctcctccgaaaacgagggtcggtggttcaggaaagattacgaagagaagatagtgtagaggccaaaaagtggaatttgctttttggtcttttttcgtgttatgggaattaatccctttcagttggtacgatttaggcataagggggcgagtaaaaatatatcagcgattattagaatatatcgaccacaactcaaaatatatcagcgattattgaaatatatcgacttaccgacaaaaactgacaacgatagcaacttaataataaaaagagggtgtgccaaaattttggcacaccctcttttatataacgattaatgaatatcacgtttcttgaaattaccgccttttacttctgctacgtcataaactgtaataaaggcgtgtggatcgatttcattaataagttctttcattttactttcttctaaacggttaattacgcaagaaatttctttgaatttctctcttgaataaccaccgtatacttcgttatatgttgcacttcggcctaaacgatcgcgaattgtttctaccattaattcaggctcttttgtaataattttaaatgcttttgaaccacttaaaccaacttcaacgatatgaatcactttcgaagcgataaagtaagcaattgccgaaaggatagctccttgaagaccgaataccgttgatacgaaaataaatacgaacatgtttaagaataaaataaggtcactcgttccaaatggtaacttacgagaaagcaatacagcaagcatatcgatcccatctaatgccccaccgttacgtaatgctagtcccataccaaaaccgatgataataccaccaacaactgtaactaataatgtatcgccttcaataatagctggtattccgtgcatgacaacggtacctactgctaatgaagcaattccgataatagaataaatcgcaaagcttttaccgatttgcttataccctaaccaaacgaaaggaatgttaataactgcgattagagctcctaatggcaatccaaataatcttgaactaacgatacttaaaccagtcacaccaccgtctgatacgttatttggaattaatactgcttctaatccgtacgctgtgataaatgccccaataataatcatcaaagcttttgaagcaatttttagcttattgggcttgtttttgataattttctccatataatttcctcgtttcaaactagtttcttatttgttacgtaattcacacctaaattttattttaacatttaatttgaaaaaattctcctttaatggatgtatgcagggaatattatcaccatattatctttaaaatatttttgaaatcagtataagaaatcccatcctttcaaaggatgggatgctattaagaaaatataaaactaagtactgatacgaataaagcgaaacctaaaatagttccacatattttcatatggcgcttacgtcccattacgacaatcgcaacatattcgcgaatcattgcgttaggccagtaataaaatgcagtttttgacccgattccttggctattaagaccagcttgtctagcgtatatgccagcgcggaaaaggtggaaattatttgtggtaaaaatacttttatatttaccttcaggttttaaagaatccataatttctttagagaacaacatattttgatatgtgtttacagagcgattttcttgcaccgtatgttcaagaggaattcctttttcaacagcataattttgcattgcttctgcctctggaagaccttcatctggaccttgaccaccagagaaaataattgttggtggtgtatttacagctgcttgtttccaatagaagtcgatagctttattaatgcggcttgcaagtaatggtggtactttatcattaattaagccgctaccaagaacgataatgaaatcttgattacgtcttggtctgttgaattggtataaaaaatatgcgcttaagaagttagataagtgtataaagaaatagaagcttataagagaaatagctgcaaaaataggctctaaatgcgatgagaccaaacttgctgggtttataatagggagtaacataaagaataacatccctaaagcagcaaggagtgttaaacagttagtgaaccgtcttccttctcgcttcattaaaattctagcattaagaaatagcccaaacattaaagcaacaataccgaaaggaagcataataagaagtgctaaaataggtaaaattataatatagcgtaggacatcactacttgaatttacagatataatcacacaaaaaagaaggaaaaaacagacaaaggaattaaataaaaagccgtttattatttttcgcggatcttttaaatatgagataagaaaaataataaataatataagaggaataattccgaaatacatcataaatatagtacacctcaatttgtataagaatttgacataccttttatattacatgattttataagtgaaaatgaaagaaaaaggattttgaattttctcaataaaatatatggatacatatgttacaatatattcaaagcgatatattaaaagtaaaatggttgaaaaggcactcaatagagtgctttttctttttgtatgcaattgtgcatattatattttttttcaaatgaagaggattacaatataatttgtagacagactttataaagcagaatttaatacaaacatttccctctactttttgtatctaacaatcgtataacaataaataattctgttttatagtgtctgtttttgaaaggtgtcttttttgaaggcacctttttttattagtatagatagttttcactgttagcatagtgtaaactatctatactaaacattagcaatcttccgtataaatattatcaatttactatatattccagtggtgttaacctacatatgaaaggctttctttttcaaaatattacccctaataaaattttgaagaagtcaactgtctccaaacttgtctttatgcttaaagaaaaagcactcaaattgagtgctttttcttattgaaacatgctatttttctaggcgattttcataaaataaaagtaaagaaatgaaagtgggtgacaaaatgccggcagttgtggaaggtgttattattgaaaactgcaatggaacaattaatgtaggggataaatataacgtacagccgattgaaaagacgaaagcttataatggatcgggatcatcaaatacaggaatgaaagtacaaacgtttagcgggattagtacggcggatgtaagggataatgatgcgtatgatcaagttattcaatcaacgttataattttaaaatgcaaaattgcataaagtaacatgtttgttgtatgttacactctagctgtgagctgttaatgattcttctgtattatagttgttagattagaaatataacatcttatcgaaaatcatacgtacaaaaaaagacacttcaaacgaagtgtctttttttactttagtgataccctttagcagagtctttatgaattttatttttaaaaatactgtagctccaaagctgatatccaataacgattggtaccataaccattgcaacgaagaacataatttttaagtttaattgactaccagctgcgttatataacgttgtactgtatgcatcgttaatacgagatggtaacattcttgggaacatacctgcaaagccagttgtcataaacattgcgattgttaggcaaacgaatgtgaatgcaaggccaattttatgtttgtacaccataataagtgcgagtacactcattagcattgcaagtactggaagaatgaatagtaccggatattccgtaaagttttggaataagtttgtccgattagcagttgctacatagaagatagctaaaataatagcagctgccattgaaaatggtcttgcgattttataagcacgatcagatacttcaccagtcgttttaatcatgacccaaagggcaccggatacgacaaatatagcagtgaagaaaagaccacctaatataccgtaatggtttagtaagctaagtaaatttccttcatagccattttttccgatttgtagtccgtaataaagattagcgaatgtaacaccgaataagaaggcgattaggaaactgccaattgcaaatgcccatttacaagttttttgccaaattggtgaatcatctttatgcatgaattccagtccagcggcacgagcaaatagtgcaagtaatactaagaataacggtgtatataaataactaaacatattagcatatgtgactgggaaggcagcaaatgttgcgccaccagctgtaattaaccatacttcattaccgccccagaacgggccaattgcttcttgtaattgatttcgttcttgtcgatctttcgtaacgaaaggaaaaatcattccgttaccaagtgcatacccgtcaagaatgaagtaaactgtccaaatcacgccccataaaccgaaccagatgattgcaagcatatcatgagacatgagctacacctccctcagtagcaggttcttctaatgcggcaggtccttttttcgcgaacttcagcattaagtatacgtctgcgattaaaagtaaagtgtagaataaaattaaactaattaatgagaaccaaatttgcgggacagatataggtgatacagattctgctgtacgcattagtttatatactgtccatggttgacgacctacttcagcgacaatccatcctgcgttaattgcgatataaggaagtaagacagaccatattgtaattttcaaataacgttttgagttttctagttttccttttcggtttaaatagaagccataccaagttaatgccataaagaacatgccgagtgcaaccattaagcggaagctataatacacgaggttaacatttggacgttcatctttcggaatatcttttaaaccaacaatttcgccattaaatgaatttgtgtagaagaagcttccgagttttggaatcgtaaggaattcaaagttcttctcattttttacatcaggaatttgaacaattgagaagccttgtccttttccagtttcccaaactgcttccatcgcagcaccttttgcgggttgatatttagctgctgatacaccagattgatgtcccataaacggtgtaattgttgcggcgaataagcctaacattaaaccaaacttaaatgattttttgaagaattctacttcatttttacgtaataagtgataagcactaattgccataacgaagaaagcacctacgatataacaaccaactacagtatggaagaacatgttccaagcgtatggattcgtaacgagtgcccagaaatcatttaattcagcgcggccgttacgcacgacgtatccaacagggttttgcataaagccgtttgctgtaataatccaaagggcggaaatgtttgttccaagtgcaaccatccacatacagaaggcacggaactttggtgaaattttgtctttaccgaataaccatattcccatgaaagtagattctaagaagaaggcaacgagtgcttcgattgcgagaggggatccgaaaatgtctcccatatatttggagtactcagaccagtttgttccaaattggaattccatcgtaatcccggttataatccccattacgaagttaattgtaaataatttaccccagaaatttgccattttacggtatgttggattcaatgtgcgggcgtattgagtttccatacatgctactaaaatgacaagtccgattgtcaaaggtacaaataaaaagtgataaaaaatagtaattgcaaattgaaaacgactcagtaacagaacgtcggacataataaatattcactccttttttacattatctacaatcagtttatagtgaaaatacgtttaaagtatgtgaaacttgttacaaagatgtgtgtatattttgaaagaattatgtcgattatctgaaaatatcttatttttactataaagcgatatcctttttgagtttttcatattttggtacactatttatgtagtgtaaacgagagaaaagagggtcctttactatgaagtcattagaagagattttgcagtacaatgagaaatttgttgaagagaaaaaatatgaagagtttgtagcggggaaatttccaaacaaaaaaatggtaattatttcttgtatggatacacgacttgttgaactattaccaaaagcgatgaatatgcgtaacggtgatgtgaaaattattaaagtagcaggcgctgttatttcacatccatttggaagtattatgcgtagtattttagtcgctgtatacgaacttggcgctgatgaagtatgtgtagttggtcaccatgattgtggtatggcaaaaattcaagcaagtagtacgattgagagaatgaaagaacgcggtataacagaagagaaattagatatgcttcgttattctggaatcgatttagaacaattcttgcgcggtttctctagtgtggaagaaagtgtagaacatagcgtatcagtacttcgcaaccacccattacttccggaagaagtacctgttcacggtcttgttatagatcctgatacaggaaaattagatttagttgtgaatggttacgacaattaagaatttactttgtcatcctttttatctgggacaggatcaaatcctcccgggtggaaagggtgacattttaatatacgcttacaagtaagccaaaagcctttgaatgcaccatgtttttgaaacgcttctaatccataatgagaacaagttggataaaaacggcatgttggtggtgtcatcggagaaatgaacttttgataaaagcgtataatcccaataaaaatctgtttcataacggtctccttttcagcatattcttaaagtattatagcacgactgtacataatactttactaatgtgcatttccgttatatcatattggatataacggaattaaattaaaagcgggagagatgttgtatgccatcagtagaaagctttgaattagatcatacgattgtaaaggcaccttatgtaagacattgcggagttcacaatgtaggtagtgacggtattgtaaataaattcgatattcgtttctgccaaccgaataaacaagcaatgaaaccagatgttattcatacgttagagcatttattagcatttaatttacgtaaatatattgatcgttatccgcactttgatattatcgatatttcaccgatgggctgccaaacaggatattatcttgtagtaagcggaacaccgacagtacgagaaatcattgatttattagaactaacattaaaagatgcggttcaaattacagaaattccggctgcaaatgaaacgcaatgtggtcaagcgaagcttcacgacttagaaggagcacaacgcttaatgaacttctggttaagccaagataaagatgaacttgagaaagtttttggataaaaagaaaaactgcctgtgaaagggcagtttttttattgtgctaagagcgactatactcttcttttgtatgaaaatatattagatactccaacatataaaataaaggcagaacagagaaaataaacaaatgctttcgctttttgctgcttctttatttcatcgattccaaaaaggatacacataatacttaaaaggatagacacgtaaggtaaaagaatagtgaagtttgcaaagaagctaaatagggcgagagaaagagcgatagtggcgattataatttgaatgttttttaacatggaatcccccttaagtagaaagaaatagttactgagagaaaataattataaatgctaaattggtcaaaatttcattctacatataacgaaagtagtttgatattaaaaagaagaatatgagactggaaacgaaaaaatacgggatactcattgattttcgtccggatttcaattcattaattcctagaagaataaagaaacaactgagaataaattgtacgtatgggagaagtgaaaaattatcggtaacatggatataagtgcttagaatgagtaagagaagcatgagaaatgctaaaaaactccgtaatatagttagagttagcattgtatagcctcctttagaccatttactagaatatttctgtgaaaccaataaataaagcagcggcccctgctagtagagcgagcagactacctcctgtttgtcgttttaatatttcctctaaacttatggtgagggccatacctcctaaaaagatgaacatataaggcattatttctctactaccagtaaaaaatccatagattgctatagataaggcaataagtgataaagtaatccgacccccttttagcataaaagacctcctctattttatgtaggtaataatgagaactatccaaatgaaagcaccggcaataatacaaataaatccagttgctaattcctttttctttatttgttcaaatgcgatgagaaacattaaagcccctaatagaaattgtgaaagaggtaaaaaattattttgacctgtatataatccaattgccgacataacgatcacagtgagtgctactatgatgcgaagtatacgaagcatattaggaattctccttattcttttttgtataaggattgtcttctagtttatcgacggaatgtttataagcatagcctttattaattgtcatgatggagagtacgaggatgattaggacgatgataataccgataattaatattttgaacataaaatccctccttttctttattttacataattttgtaattgatgaaaacaatagaaaataaaaggatgaaagaagggtgttacatggagacgaaaaaaacatattatatatcaataggaaatggtcaaatttcacaagtgaagacggcggatacgtataattttgagatttccgcaaatgatgaggaaattacggaattaagagagcactttgatcaagcatatgtagaagatttagggtcatttgtacgctcccacgttccatttgttgagtatcatcacgattcaaataatgaccgatatgatgaacaactacaaaaagcatataaaatgatttacgatttaggaaatcatgagacgaaagaattagtcgcgcaaatgggaataatcaatggattgtaattggataatattatgcagaaaagcgagaatatgctacaatttgtggtaggaaaaacttgtaaccatcaataggggagtaatggcatgtacaaatttaaagattattaccacaacactgtacaattatcgtttgaacgttatccattttctcctgagccaaagcatgtttgggttgtatgccggtacggggatcaatggttattaacgcatcatttacgtcgcggtcttgaatttccaggtggtaaagtagaactaggggaaacaccggaagaagcggcagttcgagaggttcatgaagaaaccggcggcatagtttctgatttaacttacttaggacaatacaaagtatctggaaaagacaaaataatcattaaaaacatttattttgcaacaattagtgcggtagaagaacatacgcattacgaagaaacgaaagggtctgttttattaaaagacattcctgacaacattaaaacgaatagaaaatttagctttataatgcgcgatgacgtattagcgcgtacgatgaaacatatagaagaaatcggctgttttacgaagtaaagtagccggtttcttttttttgtatgtaagaataaatgtaaatatatctttatattattttgggtatattatacaattttgtaaagatatatttacattttaggaggggaaagatggataaaagaaaagaaacgactgttactgtttcgatggttaaattaaacttttctttattttttataataattgctttgtcgtttggaattggttatttgcatatatttctttcgggtgggggcggattaaagtttcactttatctccacctctaaaaacgaaagcacctccaacaaatcatctacgatacgtgaatgcttaaaattcccccaaaacgaatcttttttccaaacaccaagaatccctacttgttcagaaccaagcacatcgttttctggatgatctccaacataaagacattcttctgccttcacatctagtctttgcaaagcacgttcgaaaatttcaggatgaggttttttaattccttcagcttctgaaacgagaatggtgtttgtatacgtatgtatatgtagtgctcgaaggttgctcatctgaaattcagtaaaaccatttgtaataataccaattttaatgtttcgctgttttaactgttgaagtagttcatgcgtgtttttgaaaggaatacaatgatgttggaagtttgtaatatagtcgtgtagtagttgttcttgcgttaaagtagtaatgttgtattcggaaaggagagtagcatatactttatccttccacgtatagccattattatcgagttcaagaaatcgagaacaatactttgatttctctatgctcttcaaatgtgaggcgaagcgattatattgctcacaaataaattgttctaaagattggcgccgatctaatagtgttccatctaagtcgaataagattgcacgaatcatgggaagcctccttgcagtttttataattaattatcgcatattcgtaaaaaaatgattatgatattttgtagaatggaataatgggggattgtatgaagaaactgtatggcaagttagtgtgttgtattatagcaagcagtttagttgcaggatgcgagagtgctatcgaggttacgaaagaaaaagaaatttgtaaaacagaagaagagtgcacgcaaataggagataaaacattacaaaaagtatataaaaagatagagggactttcagaacttgaaaaagtagaggattatgacatagaagagtatgaaagtatgaatatgaaagaggcggaacagaaaaaagaagaggatgacaattacttctttttagcttcttattatatcgatgatgatgaaattgtagatccttattttgagaaattggatcgtaagagattgaataaagtttttgcagatgacaaagtagcaaaagatgatttgttaagccagcggcaagatagagagtatcatgaaacgttatgggacatgtaccgcactctcattccagtgaaatatcgtgagaatataacagggttggatttaataacggatggttatgacggcgttgttgcccatgtcatgccaagtatggatgacccgagagattggttgcttagtttagacgtgctcgattctggggtgaatatagatgaagtgatgaaaacattaattcatgaaacggctcacgtattaacgattgggcataaacaagtaccagtggataggaaatatttagaggcgtttgatgaagagaaagacatttcatcatatcgaaataaatgtaaaacggtgttcttgaaaaatggatgtgcgagaaaaacttcgtatattaaccaattttataatgaattttggaaaccaattgagcaagagtggacagaaaagaaagtagaagaaagtgaagaggcacaaattgaattttataaagaaaagcatgatgattttgtatcgctgtatggaataacaaatgtaacggaggatatcgcagatacatttacagcgttcattttacaagattcaaaaaaggtgaaagaaggaacagagttaaaatataaaaaaattgctttcttctatcagttccctgagcttgtaaaaatgagagcggaagtgctgtcgggattatatgatgtttcaaaaacgatagaacaacaaagtggagactaatgtgaggtatgctttcgatatagtttcgttaaagaaaagcgtgaagaatttttaattctttgcgtttttttatgttgataaaattgaaaattctgtatttttattaaaaagaagaaggaactttcggtataaaatagaattagtataaaaatgtcacaatttagacacaattataatgcgcgtgttgtagggactataagtttactctcgaggaggtaatgaaacgtatgaaaacgattcttgctgttgctggtctcatttgggtaatgtctcacggttttccgatttttgaaggggagcaaattcgtagtgctttgaatgaaaagtttaatgattatcatgtgatagatcgaaaagataatgtcgttacagtacgtgtgaaagactgtttccatacagttacggttgcggatggaaacattacaaatgaaacgaaaatgtgtgataaaaggtaaaagaaagaagctgactatagcgcactgttttgagtcagcttctttttctttttccaattagaattttttcaaatgcctcaacaaatacatacataagagttgcaagaacacatgtgagtagtacgctaagtaagacgagtgtgaagttaaagacttggaatccgtagctaattaagtagccaagtccttgtttggaaacgagaagttctccgaaaataacaccgacccaggataaaccaacatttacttttaacgttgagataattgctggaaaggatgcagggagaacgacttgcttataacattgccatttatttgcgccaaatgtgtccatcacttttatatagttagaatcgacttcttgaaatgcactgtaaataacgagaatggtaatgatgatggaaatgattactcccattgcgatagaagatgaaatgtttggaccgaaaataacgatgatgattggaccgagtgcaacttttggcattgcatttaggacgacgaggtaaggatcaagtacgcgggctagaagtggcatccaccaaagaaatgtggcaataatagcaccgagtaccgttccgagaatgaagcctactcctgtttccagcaatgtcgtccatatgtggacccaaagtgaaccgtcgatccatttcgttaagaagagatcccaaatactcgaaggagaactaaagagtaaaggatcgatccattcttttttgctagctatttcccatagtgcaaagaaaagaataagtagtaaaagctgtaatgagcgagcaatccaagcacgcctgcgttctttctttcgaaattgttcatgtagttgttttatattatccaagtcgttccagctccttccatatatcttgaaagagggctgggaaatcgtagtgatggcgtgcttctaacggtgataaagaacggatactttccgggacgataaaggtttttgcgatttttccaggattcgcttgcagtaaataaatacgatcactcatcgcaatcgcctcttcaatatcgtgagtaacaagtagtgatgttttcttatatttatttagtaagttgaaaacgagttcttctagttttaatttcgtttgataatcgagtgcggagaatggttcatctagtaataaaattttcggatcagttgctaacgttcgaacgagagcagcacgttgacgcataccgccggatagttcacgaggatattgtccttctaccccatgtagaccgacttgttttaaaagatttaaagtatgttctttcatctgttcatcataaatctttcgaatatgaagtccaagcataatattttcttcaattgttttccacgggaataagtaatcttgctgcaacatatatcccatagatgaagttttcgttgtaattggttcaccatctaaaaagacgataccatcaattggatcaagtagtccagcaatgattgagaggagcgttgttttaccgcaaccacttgggccgagtatagaaataaattcgccttcttccacttgtaagctcatatcttcgagaataagtttggcattctcttttgcgaaaaaacagtgagaaacgttacgtatttgtaaaaaactcatacacttcgcctctatttcttaataacgctttcggcaatttttgtattgacgagcgcttcatgtgggacttctttttgtaattcaccagcatctttcataatcgtttggagctgtttccattcttccgcatctagtagtggatttgtcgcataagaatgttgttttttataccgttcaattacttttactgtaatgtctttcgaagtgtctttaaatagcggagaaacagcatcagcaatctcttctggactatgtgtatcaacccattgctgtgctttatagagcgcacgtgtgaacttttcagcagcagctttatctttctttaagaaactttcttttgccatgaacgttgtataaggaacagtaccagattcatttccgaatgaagcgacgatataacctttaccttctttttcgaatatgcttgcagtcggttcaaagagctgcacaaactctcctgtaccagatgcaaaggcatttgcaatattagcaaattcgatattttgaattaagttcgtatctttccgaggatcaatgccatttttctttaaaacgtattccccaaccatttgcggcatgccgcctttacgctgtcctaaaaatgtaacaccttttacgtcattccaattaaaagagtctagttttttacgtgaaactaaaaatgtcccatctgtttgtgtaagctgtgcaaagttaatgacagggtctttcgctccttgttgatgaacgtaaatagacgtttcagaaccgacgagagcaatatcaattccgccagataatagggcggtcatcgttttatcgccaccagctgttgtttgtaggtcaatatttagtccttcatctttaaaaaatcctttttcaatcccgacatataatggggcatagaagagagaatgggtaacttcgccaacgcgaatgttttgagtttgttctttcgtactttcttttttactactacaagcagcaaaagtaaaaacagctagtaacatgatgcaaaaaatcgcgattaattttttcactatataacacctcctagaagtcactctacaagcatgatatgtaggtaagtgcccatatgtgagtgtagatagcaggaattttttgggtggtaaagaagtacaaatataaggggtgataaaatggagtacgaatacgatgatagcgtacatttacatcttgattatttcgggacagaatgtgatatggaatcgatcgcttataagaggaagaatgaagacgtatgggatgtgtattttaattttggagtatacggtattcagaaagacgatgtagagttaggtaggtttatggacgaatatgccggttattacgttttttctgtacatgctcgcgatcttagttgggaatttggaagtgcccagtttgaagagtgggttttgaaaaatcggatagtagaaaaaacgctacaaaaataggaggaattttgtgattggatttctcatcttattatttatttttgtggccggattttttattatgcaaatgcttatttaccgatttgcaaagaaaaacatccataaatatacaaaaataaaatggtttcatatgtggctacatatgaatatgaaaaaaggaccgagattagatttttttgattttgtagttatagtgctcgtatgtatcgtatggaaaatatggctgctcccttttatataatacacatactaatcattttctcttttcgttatagtaatagttgtaaaaaacttgcatttatacgtaaaacagtgagtggtgttgtgaaagatattttgacaaatacagacacacatacatacggaattaaagtgtgattacagaatggacaaattggccgtgtgtaaagtgtgggggaataagaaagaggtcgtccaacggtggacgacctctttcttattatgcttgattagtgcggaagaatggaagcttctgcacaatgtgaattaatccgtatgcaagaattaagcacataagaggattaatgaaaaatccatagcgattaattgctaagaataagtttgagaagataatgtaaataattgaacttgctactagcatcataacgcgtttatgtttaaatgaatttagcatgaagcagaagctgctcaagaatgtaccgatgataaacactctatgacatagttgcataaagttgtgaatacgatattggtctacagcaggagctgttttgaataattcaattgttttaccgacagtgaaccaagagaaccaataagtgaagtccgtcttaaatccgttcttaattaattcttttgcgtatgcacctttgtcatctaagcctttagctctcatttcatttactatattttcatatccaattttattaaatggatctgcaccggcaattagtggatctgcaccttgggttgagaataaaataaattggttgagtgctaagtagttacgaacaacccatgcgccaataataaagaaaggtccgataaaccataacaatccgattcgaatggattctttaaatccatatgtaaataacacaacaagaacaggaatgagcatcattggagctggatttggacggaacataagtaaaattgaaacgacaattccaaaccatatatggaatttcactttattgtatttccatgcgagaacaaatacatatacacataacgccaataagaatatggatggaacttctgttagcaatgtacggaagtatgtatagttacttggataaatagcatataaaatacttgcaacaattccataaatgtttttttcgaacaattcttttcctattaagaatactaatagcactgtgcaaaggttcatgatcatgttaataacagttgctacgtaatagtaaggaattgatgtaatatcagaaataatcatagcgccagctaatagtaatggctgacctggtgtaatatatgcatttttccctggaacttcactaggttctaaatacacataaccaaatacaccatgttttaatagttgttcagctgttaacgaatagttaaaggcatcatttgcaccatatgttactttgactaactctccatctaatcctggctgttttactaaacaaaaaacgtgcaacaggaaagaaagcgccaaaattgcatataccgctttaggcaaactcttaaacttagtaagcaaaaatgagcaactccttttttattaattctttcgtaattttatgtgaaatctttaatagtattaaggatttccaaaacatagttattatatcataaagtggaatgctgaaattaagtttttcaagaatgagtaatttgtataccacaatttaactgttgattaagggaagattaagacaatacatttatggtagaagcaagtatgctgacgaaatatgtaatatatgttattttaatagaaatagttctttcgatgcggggaaattaagacatagaaacgagggaatgaattgaagtatggttctacactttttcatcttccaaaaagaaatatattaatttctagcattataagtagtatggtgactttattagtaataactatgctgtttatgattttaaaggtttttaatttagacatgatgaaagatcatttaaatcaaaagcttgttttaagtgttatgatgatgttcatatggggcataacgttttatattacgcatttcattaaaaaagagatgtctatacttagagcatccctgcgagtgcattttatattacttttattagctcatacagtagcgttattttatattgtcatgcaagttaatatgagtttcatagaggcaatgaattggatttacttttataatatgcagtttatattaagttttgtagtaatttatgcgatatatattcttgtatataatttaataggtaaggtttttctaagtatggttttaacgagctgtacgttagtcattttatgtattgtgaattatttgaagcttatttttagaggtgatccgttatatccttctgatttcacacaaattactcatatgcaatctgttataccgatggtgatggactattttagttggagttatatttttgtcattatcttaagtatcgtagcttgtattgtagcagggatatatatgagaaggtatattcaaaatgtaaagattcatctaggaataagagccttattagtagtaggatctatttttgttctatatgcgtatggcaattttgcgaatacatttatgaataaagtatttcaaaaatcaggtgtagattttgttttgtggaatcaaaatgagaactacgcttcaaatggttttatacttgggtttattagcaatttagatacaacagttatggaaaaaccaaaaaattattctaaagaaaatatgcttcaaatagcaaacgatataaaaaaacaatatagtggaaatatagggagtcaaaagaaaaaagagaaaccgaatattatttttgtaatgagtgaatcgttttgggatccgacgaaagtaaccaacctttcttttagtgaagatcctgtaccaaatttacatcattatatagaaaactttcctgggggacaaactatttctcctacatttgggggaaatacggcgaacgttgaatttgaggcattaacaagttattcaatgagtttgttaaagccaggttctataccatatcagcaggttattacaaataagaaagaaattccatcaatccctacggcgttgaaaaaagaagggtattacacaagtgcaattcattcatttggtcgcacattctttaaacgtgatgatgtatataaggtgttaggatttgataagtttaatgcagaggacacgatgaaaaatgtggatattgatggagattatattagtgatttagcgatgagtaaagagataattgctgagttagaggaacaaaaacagcctacatttattcatgcagttacgatgcaaaatcattttccatttacagagggccgatttggtgaaaacctaatagaaattagcgggctagaaaatgaagaatcaaagggagaattagagacgtatacagaagggttaagacgttcagatgaggcacttcaatatttaatagagcaactagataatttagatagacctacattattagtattctttggagatcatcttccatcactaggaacaaataaatctttttataaagaaaacgggtatataacgaatgaaaaaacaccgagtgaacgtttagcgatggcgcaaacgccgctattaatgtatgcaaactttgatatgccaaatgataatttaggtttagtaagcccaattcatttttctaatcttatttttgattatgcaggattaaataaatccttattttatcaatttttatcggaactttacaaggaaataccagtgcttagagatgaattaaaagttgataaaaatggagaagtaatcaatgatttaacaaagaaacaaaaagaaatgttagagcaatataaaatgctccaatatgatttactcgttggaaatcaatatagtacagatatcctctttaaataaaagaaacaaaaagaacttgtataacgatacaagttcttttttcatagtatttaacggggtaaccagacaagctgggtttagggagtattacctgtacatttagtatatatgaaaatgtaatcgttttatttgtgtatttgtgagaaatatgtgaattttatgttttgtgaaaaatctattatattaactttcgttcttgtattgcagttgttatgcatgtaaaaattttatcagttctttatttaattcatccgcttgatcgattggtgaaccatgaccactatttgtaagagcatgtaactgagaatttttaattcgttgttgcgtaagctcagcacttttgtaaggaattagttggtcgtgaacgccgtggaagatttttgttgggacgttaattttatttaaatctttcgttacatcttcatttgcagctgcttgtaaaattttgataagggcataagaagcggactgcataccgagataagaaaaccattcaagggttgcagcccctaagtttctattgaaaaaggataaagatacgtcatttaaaaattttggtaaattagcatacatttgattaatgagagcatctgcttgttctttcggtacaccgtaaggggactcttgatttttaacgaaagagggggagacagcgtcaattaatgcgagcttagaaatgcggcgcccatgatagcgagacatatagcgaatagaaagagcaccaccaactgagaaaccgactaatgtagcgttctctacttggagtgcttctagaacaattgcgatatcatcggctaatcgatcatacgtgtaaccagtccatggcttatcagattgcccattccctcgtatatccatggcgatacaacgaaagccatgctctggtaaaacattgagttgatattgatacatttgatgatttaaaggccatccgtgaacgaagaaaacagtcttactacctggaccaggattaacgtcttgcacaaaaatatgcacatctttctcgacagtaacaaacataaaactccccctgttctatcaataggctccattctaaaagctttgttttactttttaggccgtctatataaaacatcctccataatatacgtattaatgatcatagattttatgctctgtatatagtctaaatatattgcgtttttggtacgattttcctcaaatgttcgatttatctttgtttgtctatgaaaatcatttattataataaatggtattctttgagatgttattttgaaggggtgttgaagtgaaagaaagttttctatcatataaagaagaagaaaggaatgcaaaactccttttatgggtgttatatgtcattgttattgtatatcaaattttctatgcaatcgtattagaagataaatcaataatggataagggatacaacataatatggcaagttatttgcggagtagcaatactatgcgtgaatatatatttactgaaaaaagagaaggcaaaccttgttaaatatgcatggatatttgcatacatagggatagaaatcgctaatatagtttcgtatattttttataataaggcggcgtttgatgcgacaaatataatagaaattattctcattttctttgtacccatatttttaaataaaaaattttatgtgtttttgctttcctctattgtaggaaaatatttaatttatttatttgtattagaggaaataaaagcatttatgttccttattatgtgtacacttatgttaatagttgtatatatcattttaaatcgatttttacaatatctttcagccgtaaaggaaagtattgcgattgctagtgaatcacaaaaattagcagtaatcggaaaaatggcagcgactgttggacatgaaattaaaaatccactggcttcattaaaaggatttacgcaattacaacgagagaagcatgaagaggatcctatttataaacgtatgatttttgaaatagaaaatatgaataatatgataagcgagttgatggaagttgctacatgcaaaccttctatttataagaaacatgatgtaggaaaaattgtattacaagtaataacaagtcttcgcggaaaaatgaatgaattaaacgtgcagtttatttctaatgtggaagaaaaaacaatagaagttgaatgtgatgaacgaaaaataagaggagtctttttatatacgataaaaaatgctttagaggcaatggaacaaggtggcatattacatttgcaattagagaataaagggaaagaatatataataatcagcgtaatcgataatggtcatggtattaagcaagaaaacttaacccgtgttacagaagccttttatacaacgaaacaagataaaattggtctgggacttacggtagcgaatcgaattgtcgccgagcaccttggtgagctgcatatttcaagtgaaagagatactggaacgagaatagacatcattctcccaaggaagtgtggaaatactgaaatccaagtggaagaaaagctaggagttaccatatgaataaaggctatatatttaaaaatgaagaaataaaggcattgaaagtatttttaagtttattttttattatattttttgtgtatgatcttgcctatgaatttatcgtacctttaatcgcgggagagcaagaaggcgtaggaaagtttgaagatggtttaggtttatggctttactttttgacggtagtattgttttgcagtggaatatactttatgaaatggaagaatgtttttgtggtaaagtatattattctaattggctataatgtattagattgtatccataacattatgatttattatggtagcgatgcggaatttgacggtggaaatatagtagaagtattttttattttgtttgcaccaatctttgtgaacaaaagatatttctggttagttccagcgatacttgtcgggaagtacgctcttacaggaatcattattcaatcttctctcgttttaatcccaatggcattatatagtgtatttactattatatgttggattatatttttgagggttcagtcttacgttcgtacgcttgagatgatggacaaagaaataaaacagacagaaaaactagcagctgttggaaaaatggcaacggttattggttataagattagaagacctttagcaaacttaaaaaaacttgtgaataaacaagccgacaagcatccagaggataaaatttatagtgatattatgaaacaagaagtagatcggattcatataattgctacagaacttagtggatttgagaaatctaaatcactagaatcagaaactcataacatacaagaaattatctcttatgttattcgagttatggaaaagcctgctttaaaacaaggagtccacatacaaggtatttacagtaaagacttaccgtccattacatgtgatgaaaaacgattaaaacaggtcttttttaatttaatcaaaaatgcaattgaagcaatgtcagttgggggaaaaattacgattaaagttactgtaaaagatggaatcatcgttcaagtgaaagatgagggatgtggtattccaaaagataaaattccaaagttaaatgaagccttttatacaacgaaagaaacaggaactggtctaggtttagtagttacagaaaaaattattaaagaccacaatggtaaaatgagttttgaaagtgaagttggggttggaacaacggttgaggttatgttaccactgcattaaatagaaaaaacatcacttatttggaagtaatgcttttgtgttcttcttaggtagacgttctaaaaaagaggacgataacgaaaaataatatattgatagtgtaaaaagaaaataatggatgttttactatgaaaaatatataatggctttgtctgttatttgttgtagttcatttatatttctatttgttgacccgaatctcgggtcttttttttatgaaatgaattgctatatgtcagtgattagaaaaatagaatatacagcacttgcagtaattccaggggtaatataaagggatatagcatctcctcttgcaactgggtttccagttgtaatactagtccaagttacagtagcggaacctactgccggagtaggattaaatacttgaatttgtcctactccgctatccgttggtttaatggaaaataccatagttctggtgtttccgttagaactgctgttgcgtctgccgtcgcaactaaagcaattaagtggtacatatacgttctcctttctatattttgaaaatctagtatttaaaatataacttaatatatatattatgaattctatatttttgtgtggcggatcgtattttgtgtctagatttcaaaaatagggtgagagtgtattgtatatcgaatttttttctataaatacagaataataagtagttataaaatatccattacttattttgaaaatctagtatttaatgagatgagaaaatcatctgttttcttaataaaatcatctggttgcacagtaaatgtagcagattgatagtttggtaaccattgtacgccaatcgttcgtacatctgcctgttttccagcaagtatgtcagcatcactatccccaataaaaattgcttcgtttgcatttacatttaatgtatttaatacaagaagaataccttcagggtcaggttttggcttcattacatcatctccagctactatacagtcgaagaaagaaactaatcctaatgcttttagagaaatatccaggcttctttttgcttttccagttacgatagctaactgaaacccttgtttttttaaatgtattaaaaggtctactatttcatgatttcgctttacgtaatcatgatgcttttcttcataacattcatagtatctttcaactgctacttctttttcttcagaaagtaagttctcatgaataataccaacttcacttggaccaaacatagaaagaatctctgcttcagtaatttctttattatcaaattgccaaaaaacgttttgaaacgagtaataacataaaggtaaagtatcagctagtgtgccatcaaaatcaaaaataattgtacgtagcattttctcacttccgttttaagttattttaaggtttatttaagagattttgttgtgatatacttaaaataacttaaaagtacttaaaagtaaatgaaaatgggtgagagtatgaatcaagaggaacgtttaataaaaataatggattatttgaatgaacataggacgatgagtttgaagatgatgtgtgagctatttcaagtttccagagatacagcaagaagagatattgtaaagttaacaaatgaaacaacaataatacgaactcatggtggtgtagctttatcatctttccaccgtaaaatatcggattatgtaaatcgtgaggaaaaagaaattgaatataagatatctattggaaagcaagctgcttcttttgtaggagataatgaaattatttatcttgatgtttcaacaactgttaactgtatggcttcatttttgacagcaagtaatataacggttgttacaaattcaattgatacagtaaatcatttaatggatatggagaatgtaaatattcatattttgggtggagaattaaataaacactcacgttatatggcgggtttttctgcaatggagaaactaaaagattatcattttgataaagtttttattggatcacccggccttacagaagatggtgtttattatgcgtatgaggaagatattcattttaagcgtcaaattgttaaacaaacgaatggagtgtttttacttgccgatgagacaaaaatgaatcaacgtcaaaactttaaggcactgtcattagaatcaatagatacaattattacgaatgatgttattcccggcaatttagaaagagtagtgaaagaatatggaattgagctaatcactggagtgaagtaaagggggacgcaaaaatgaagggaattatatttgatattgacggaacaatgttagatacggaaaaagcagttttatattcattacagagaacgttgcgagatgaagggatgaattattcattagaaaagctacattttgcattaggtattcctggtatggctgcgttacaagaaattggtgtggaaaatatgaaagcagttcatgagaaatggatacgtaatatggcagattttaagaatgaaattacagtatttaaaggaattgcggaagtgattgaaatagtatcttcatataagattcgaacaggtattgttacttcaaaaacacgccaagagtttatcaatgatttcaagccatttggattacattcatattttgaacactctatttgtgtagaagatacaataaaacataaaccacatccagagccacttgtgacatgtctaaaaagattgaatatagatgcacaagaagcgatatacataggtgattcagtatatgacttacaatgcgcaaaacaagcgggagcaaaatttggtttagccctgtggggagcgaaaacaaggaaaggattcgaggtggctgattatatttttcaaacgcctcatgaaattttaagtttagtaaaaagagatagctaaattggctatctctttaaaaatttataaccaccatttctcctgcggaagcaaaataatatccacatcaaaattttctttaaaccaatcatacatcaatgtctctttcactaaatattcagaggcagagtgtgacacaccaattagagacatattcgtttcttttacataatccataatgagcgagtatttatgtcggccgtaatcattgtcgatatggcagtggatttctcctgtaatatatgcttcagcacctttttcttctgcttccttcattaaagatacaacatcgccacacccagcgataattgcgatttttttaatggaatcatgtcgtttaccttcgaagtctgtgtaaggaatctggaagagttgttttagatgtttttggagtgcttctgttgatgtttcatctatttcacaaataaggccaattggttcttgttctggacctccatatgcaaagtcgtccactacagtagcgtttaatgcttttgcaattgaaatactcgttccatgcgtttgatgaaaatccattggtacatgacatgtatatatagaaagttgtttttcttttattccttgcaaatatttttcaggaattggtatgaaaccgcgacctgatcttccaagcggatcaccacactccattacaaggggatggtgcataaagagtaaatcaccaggtgtggattgtgaaatgaatgtttcaagaatgtcatctgtagggaatacagctaaaaatactttgtttacattttcagatccgtgcatcataaggccgttaaataaatctacaaaatttgcttcgaaaaattgttgccaaggaaatttgataggatcatatatggctgggataaatcgactaaaggcactatcttttccgtatttttcaatttggaataagtgatcgagtgattgctctattttttttaaggctggcatgtttgataatcctccttaagatgattcttgctttatgagttgtttgtattcttcgtagcaaaataagaagcggataggaaacaaataaaacctaggatccagctaatagaaggagaatagggaagtacatgctgtaatagcattccgctagaaatgaagaaactactaaatagacctaataacatgggatatcgttgtagtttgaacacggatagtaaacatcctttctcctgcatgaactactcataaaagctcgattactgaaactttatcacatacattgtatattagtcttaattttctgtatataacttttaagaaaaatgatgatacaatatatgaatgataagagaagagaggatgaagattaacatatgtacgttactgtaacagaagcagcatataaaaagattatggatacgattccaagtgaagcgaaatatataaagttattttacgataatgagggttgcggttgtgtcatgagcggaatcatcgatttagtagctgtagcagagaaagatgagcgcgatgtggatattgaatcaagcacaatgaactttatcgctgatcgtacaaagcttgtatttatggacgataagttaacggttgattggcatgaaggtggaggaacttttcagttgaagagcccaagccagttttataatccaaatatgaagttacacgttcgaatatagtaaaggaaaggtgattccaaaatgtattttggaatcaccttttttattttataagtcgctattattgtcgatttttgttgataagtcgatatattgaaaaaatcgctgatataaatggagttgcgctgatatatttgggaaatcgccgatataaatggagttgcaccgatatattcagaaaatcgccgatataatttcatttaccaaaacgtttcaaaagtaaaaagattttttcacataatgaaatgtacatgtgattgaattttctgtataatcttctttgcggaggggatacgcatgagaagatggggaattgagttgttaattttaagtgttgttattatttgggggattaactatacaattgcgaagtatggacttttagaatttacagcaattgagtttactgcacttcgcatgatggcggcggcaccgcttctgttactccttaccttttttattgaaaagtcggtttatatggagcgaaaggatatacctagattaattatcgttagcattgtaggtattgtactgtatcaaacgttatttatggaaactgtcaaatatacatctgctacaaatgcctctttactcatttctatttcacctatttttacaactgcatttgcgattttcttgaaacaagaaaagttttcttctcgaaagttaatcggttctatgactgcctttgttggtgcagcattagttttagtagcaggacattcgcttactagttctttttatggcaatggaattggacttattacatcaatatgctgggggctttatcctgttttagcaggaccattaattaaaaaatattcagcattacgtgttacagcatggtctgcattagtgggtgcgattccgctattattgttaagtggtccacatgtgtttgtcatgccatttcacattactcacggaatgacactatttgctttactatattctattttctttgtaacagtatttggtctagtaatgtggtatgttggtgttcaaaaaattggggcgtcacatacgatggtatatatgtatataacgccgcttgtagctgttttatttgcagctgtctgggcaaatgaatatgtatcgtttcaacaaatcatcggtggaattatcatttttgtcggtctatggtttgtgaaatcggagaaagtaaaagttcattctattgcaggggaacctatatcaaaataggaaaacagatcacctatgatctgctttcctatttttttatttttggtaagaagatgagaaataagatagcagtaataagtggaattaagtttaaaaatggaatacggaagagtgtaataagaataatacctggaagaagaacaccgaggacagcgtaaaaaatgctatggtttttcgtgtaccaatacaatgaaagtccaataagtgcagggataatgaggtgaatgagagccattaaaaaataaatcattagacgccccctttatttgtgtgcttattacatcatatccgtatgttcatagattgatatcatttttttcataaatggacgaaaaaagtttgaaaaaccgtcacaaaatatgagaatatgatgttttaaatcttgtataatattatttcctaaaaatatttaaacaacataaacatactgtttatgttgtttttaatttgagtgaaatggatgtaaggaatatgaatttgaaagaaattttttgttggatagataaaaattactgaagaggagaacagcatgattagtatgtcattaagatcgtttaaaattcaatcgtattatttactaggttttcttttactaggctggatgttaacgccgttttcagctcattttctaggtgctggaattgggcttattgtaagtatgtattgcgtttggcttttagggagacgaattgagaagcttggagatagtattgtaaagaagacgaaagcaccgacactcggtatgtttaaccgttttgcagctgcaattttgggtgctattattatgtacgaaattgagcaccacatggttatgtgggcatttgcagtagggattttgggtgggtatttcttaattgttgttaatttaggatactatagcatgaaagatgagaaagaactaacaaagagctaaaaaagataaaagacttctttttagatggaatagatgatccagccacggatagaagcggtcagggccttttttagccccatacgatgtgaaacccagtagggatataatgtatatattcgaagctgtaattttataatctaggtcatagatgaagagattagcgtttcactttatataagatatagaaagaagcttacgttttcacgtaagcttcttttttatgtaagtgtgtgtaaccgttaagccgcattgggttttgtcggtgagtacgcgaaactttacggttacacgacacttattcatatgagtaaagggttattccaacagaaagttttaatttaagcgattggaccgcctaagttaataatgtcttcagatacgctgtcgaactttttgaagttagctttgaattcatttgcaagttcgattgcttttgctttgtaagcagctttatcagcccaagtttgttcaggcattaacacttcgtcaggtacacctggtacgtgaagtggaacttcaagaccgaagatgtcatgtttagctgtttcagttttcgcaagttcaccgtttaatgcagcttgaatcattgcacgagtgtaacctaagttcatacgtttaccaacgccgtattcgccaccagtccagccagtgtttactaagaatactttcgcatcgtgtttctcaattttttcaccaagcatttcagcatagcgagatgcatcaagtggtaagaatggtgaaccgaagcaagttgagaatgttgcttgcggagatgtaacaccgcgctctgttcctgctagtttactagtgtaaccacttaagaaatgatacatagcttgttcttttgataacttactgattggaggcaatacgccagatgcatcagcagttaagaaaatgattgtatttgggtgtccagcaacacttggcagtacgatattgtcgatcgcatgcatagggtatgcagcacgagtattttctgttaaagtagtatcgttatagtctgcgatacgcgtttggtcattaatgataacgttttctaaaacagatccaaatgtgattgcatcgaaaatttgtggttctttctcgtgagaaaggtttacacatttcgcgtagcaaccgccttcaatattgaatacaccgttatcagaccaaccgtgctcatcatcaccaattaatttacggtttggatcagcagataatgttgttttacctgttccagataaaccgaagaataatgctacatcgccttcttcacctacgtttgcagaacagtgcatagaaagaatatcttgttcaggtaataagaagttcataatagagaagattgattttttcatttctccagcgtattctgtaccaccaattaatacgatgcgtttttcgaatgaaaccataatgaatgcttcagagtttgtaccgtcaacagctggatcagctttgaaattcggtgcagaaacaattgtgaactctgattcatgagtcgttaattcttcttcagttggacgaatgaataattgatgtacaaataaattgtgccatgcatattcgttaataacttgaattggtaggcggtaattgcggtcagcgcctgcaaatcctttgaagacgaataactcttctttttcttttaagtattctaaaactttagtatataatttattaaaatgttcttcagaaatcggttggttcacagctccccaagcaattttgtcagcaaccgatgcttctttcacaataaatttatctttaggagaacgtcctgtatattttcctgttgaagcagaaacggcaccagtagaagttaatttcccttcatttcgcattaatactttttccactaattgcggaacacttagttgaatctgtgcattgcttccgttcaataattcgtgtaaaccaatttggacattcacagtactcatatttatataccatccttttcatttaatgaaatatttctcgtaatccccaacaagagtataacacaattatataaataatgtatactatttatttctttttgtttgtgtgaatgcattatttccttattaatatttcatttcaggcgtattgagaaaaactttcaggaaaatgtgaatattaattgacaaatgaatatcatttctttagtataggttgggacggatactctcttatcccgagctggcggagggacaggcccgatgaagcccagcaacctcacttgtattgataaatgcaggtgaataggtgctaaaacctgtgcgaggctacaggtctcgaacgataagagcgaagggcaaaaagcagtatgcaagtagcaaattaaacctttcctctatgtaaagtaggaaaggtttttctgtatgcttgtgtgggagaataaatgtatgtcgcagtttgtggcaaattaaggatgagttccgtacaatatatacaattactgtagggaggtttaccacatgacaaaaaaacgtcatctgttcacatctgagtctgtaactgaaggacatccagataaaatttgtgaccaaatttctgattcaattttagatgcgatcttatcaaaagacgcaaatgcacgtgtagcttgtgaaacaactgtaacaactggtttagtattggtagcgggggaaattacgacttctacttacgtagatattccgaaaatcgttcgtgaaacaattcaaggcattggttacacacgcgcaaaatacggattcgatgcagaaacttgtgctgttttaacatctatcgatgagcagtctgctgacatcgctatgggtgttgaccaagcgctagaagcacgcgaaggtcaaatgactgacgctgagattgaggcaattggtgcaggagaccaaggtttaatgtttggttttgcatgtaatgaaacacaagaattaatgccacttccaatctcgcttgctcacaaattagctcgccgtttaactgaagtacgtaaagatgatacattatcatacttacgtccagatggaaaaacgcaagttacagttgagtatgatgaaaatggtaaaccagtacgtgttgatactatcgtaatttctacacaacatcatccagatgttacatgggaagaaatcgatcgcgacttaaaagagcacgtaattaaagctgtagtaccagcagaattaatggatggagaaacgaaattcttcattaatccaactggccgcttcgtaattggtggaccacaaggtgatgctggtttaacaggacgtaaaatcatcgttgatacttacggtggatacgctcgccacggtggcggtgcattctctggtaaagatgcaacgaaagttgaccgttctgcagcatatgcagctcgttatgttgcgaaaaacatcgtagcagctggtcttgctgaaaaagcagaagtacaacttgcatacgcaatcggtgtagcacaaccagtatcaatttcagttgatacattcggcactggtaaagtatctgaagacgtactagtagaactagttcgtaacaacttcgatcttcgcccggctggtattattaaaatgttagacttacgtcgcccaatttacaaacaaacagcagcttacggccacttcggacgtactgatgtagatctatcatgggaacgtacagacaaagctgcagctttaaaagagcaagctggtctataatatatgaaaaaaagctttgcgcggtgagcgcaaagctttttttatttataattacgttggaataaagcgaagagttcaatgtcatgccaagtgccgttgcggaatatagcttctttacaagttccttcatgttgaaaaccaagtgatttatataatttaactgctctatcgttaaaagaaaatactcgtaaagaaaggcgatgtaaatttaattctaaaaatgcataatccaataatagggttaaagcttcctgcccataaccttgcccccagtaatcctttttaccaatatcaataatgcattcagcgtttcgattatacgaatcaatatgaattaaagaagtaataccaattggaagatgcgtagctttttcttcaatgatataggtcttagagttcgaagaatgaataaattgccggcaaagtttttctgtgtcttgaaaggaatatttatcaagagtgagtgtagttgaactcataacgtctatatcattatgccatttataatatgttagaatatcatcttcggaaaactttcgtaactggatacggttggattcaaacaatgtaaacaccccttttgtatttactggtttttgttcattatctcaacacacgaactacaataaatttgtccttctaattcaatatactttttcatattcgtcatgtcattcgccggaaagggcatatgaatccacgctttttcatacgtttgtatttctgttttacatgatttacaaaagattgatttctttttgaacatatgtgatcaacctttcatttgacgtgctttacttgcgcaaaaggcactacttagtaaaaatagtgtcgcgaatataatgcttactaatgtagcgtatggaattgcgccttttaaggaaaagccgacagtgattgaagcgatgaataagaggataaatgttgttgttaattttttataaagttccatacaatgtagacctccaatttattttttagtacaagttttaaaattgaattctattatgtagaaaatataaagagtagctaaagatgtgtagtctaggagtataagaaagtacactttcctttttgtgggttagtatacttatattgtatcatggcgcatgattggcttcatacataattgtgtaaaggtatgtatgataaaatgaagaaaagtctttaagaaaggaaagataaaaaatgagtgtaactgaacataaaaaacaagctccaaaagaagtgcgttgcaagattgttacaatttccgatacacgtacggaagaaacagataagagcggacaactattacatgaattgttaaaagaagcgggacataaagtaacttcttatgaaattgtaaaagatgataaagaaagtattcagcaagcggtgttagctggttatcataaggaagatgtagatgttgtattaacaaatggcggtactggtattacgaaacgcgatgtcacaattgaagcagtatcagcgttattagataaagaaattgttggatttggtgagctgttccgtatgattagttatttagaagatatcggaagcagcgcaatgttaagtagagcgattggtggtacaattgggcgcaaagtagtcttctcgatgccagggtctagcggagcggttcgacttgcgatgaataaattaattttaccggaattaggccatattacatttgagctgcatcgccaatgagtaagtatgctggaattgtattagcgggcggtatgtcgagtagatttggtgagccgaaggcgttagcaatttggaagggaactacttttgttgagcatattgtgaaagtgatgggaactactttgcaagacattgtagtaattagccatactgatataaaagagcgagtagagcaattcgtacaagttcctgttatagaagacattccgcactataaaggaaatggaccgcttgcgggcattgtatcaggtatggaatacatagaagcagattggtacgctattatgccttgcgatgcaccaaacgtttcgcatcaatggtttgccattttactagagcaaacgagcaatgaatatgatgcggttgtacctattattaatggaagaaaacaaccgctacttgcggcgtatcataaccgcgtgaaagaaaagatttatgctttacttcaggaagaaaaaagaagtatgggccagcttttatcacaatgtaatgtgaagtatgtttctggagaagatgtacaagcgaatgcggattggtttataaatgtaaatacgaaagaagaatatgtgcaggctcaaaaagacctttcaaatgaatgaaaggttttttgatatacagaattggggaacaattactgtataaaggtatgtgagtaagttgattttaaggggaattcttaaaatcattatacagtttaaaatactgtataaccatatattaatttttatgggtttttattacaagtctgtttagttatgtttatttttgatataattaatatagaaataaaacaatgtttaaccttatgtatcatttattaaactaaaatttatgaccatgtaataaactcccttcgtttttttgaagggagtttttctatttaagcaagcaactctgatgcgttatgctgcaggacttcttcataatggttaagcaaaccgcgaaagatctcatcccagctctttgatttcgcaaaagatgaagctgatattcccatctgctcaagtttttcttcattttgtaataaaaaataaatggatgatagaaatgcatcttcatttttaggcggacaaagaactcccgtttttccatctgtaataatatttttaaccccgccactatttgcaccaatgacaggtgtaccgcatgcgagtgattcaagtacgacatttccgaatgtttcagtagctgatggaaacaccattatgttagaacaagcatatgcttcagctaaatctgcactttgtaaatagccagtaaaagtgatatttgttttcggaacagcttcacgtaaacttgttgctagaggaccgtctcctgcaatgagccaatgaatatcgtttcgagtatgtgctgttttaacgataaggtgttgcagcgtatcaatatctttttcaggagcaattcgtccaacataggaaaggacatacttcgctgtaatattatatttttttcggaataggtctgtattgtaagcaggatgaaagagtgtgcaatctacaccacgtccccatatagagagggtctgaaagcctttgttttttaattgatgtaatgtttcaaaggaaggtacaaaatttttttgcatatgactatgaaaccattttaaatagttccacagcatattggagaggaattcgattttgtaataacgtaaataggcatcgaaatcagtatgataagaaccgacaactgggatgtttaacttttttgcataatacaatccacaaagtcccatgttgaaaggtgtggcaatgtgaataatgtcaggtttaaaggaaagtagttcccgtttaatgcgcggagtaggaaaagaaaaacgacattctggatataatattgttaacgggatacttctcatcttattcacattcgctacaaaattatcttcagctgtatgctgaggggcgaaaacagaataggcgatctgttctttctgaaaatattgtgttaatcgctctaacgttttcgcaaccccgttaacttgtggcgtaaaagtatcggtaaaaatggcgactctcatcatatcactcctttatgtgaaaagtgggatgaattgataaaaagagatgatgccagaacaagtgccaaggcacataccgacgaatacatctgacggatagtgaaggcctaaataaatacgtgaaataccgacgcataacgctaacggtaataggaaagcaagtaagcttggattatagcaaataaatggaatgaagacagagaaaacggctgttgtatgaccagacgggaaagagtggtcttttaatggatggactggatattttgcatcctgaattgttaaataaggacgttttcgcggataccacctttttaatatttgcacaggaatatggctaattgctaacgaaatagcagttgcaattgcagcttgatgcaaagttccctttgcgaaaattaaaaagaaaagtgtgagtccgatggagaaagtcgcgccaccgatatgagtaatattgctgaaaaagatatttaatgttttttgatcaaagtagcggttaattcctctgaaaatgtaacattctattttatataatccactgaccttcatgaaaattctcctccctcatctacatatatatggagatattagcttttattttaataagattttgttgagggagtaataatgttttgtaaagaaaaagttagattttatataaaaaaagctgccaatcttatggcagcggaaatttacttctgtaatgatttataatattgacctttttcaacgtattgcgtgcgaatacgctccatatctttacggtcttcttctgttaattcacgaatgactttcgcgggacgaccgaaagctaacgtgttcggcggaattttctttccttgtgaaacgaggcttccagcgccgataaaagctccttcgccaatttcagcaccatctaatataatagatcccattccaattaaagcatctttcttaatatggcaactatgtaaaatgacttgatgcccaattgttacgtcgttttctaaaataagaggatactgcgggctttggtgaagtgtacattggtcttgtacatttactcggtctccaatgattgtcggtgacacatcaccacggatgactgtattaaaccaaatacttgattcctcgccaacggaaacatcgcctgtaatcgtaacatagtcagcgataaaagcactactcgcaattttcggttttttttctttgtaaggatatatcatgtaaagtcttcctttcctagagactagttttagtgtatcaaattatgagaaagagtgaaatggaggagagccgtatgtggaattatgaagcggaggaagcaaaagctgtcattgttattgtgcacggcgcaatggaatatcacggacgttacgaagccgttgcggaaatgtggaatcatatcggctaccacgtcgtgatgggggatcttccgtcacatggaacgacttcaagaaatagaggacatattgattcatttgatgaatacatagaggaagttaaattatgggtgaaagaagcaagaaagtataggttacctatttttctattcggtcatagtatgggtggtcttattgtcattcgtatgatgcaagaaacgaagagagaagatgtagagggtattattttgagttcgccttgtttaggggtagtgactggaccctctgctccgcttcaatttgcttcaagaatattaaatgttgtggctccaaaattgcaatttgcaacgaatcttacggtggaaatgtcaacacgtaaccatgaagtgagagatgcaatggagaatgattctttgttcttgcgcaaagtatcagtacgttggtatagtgaattgattaagtctatcgaaattgctcataaaaaaatagatgattttccagatgttccgctcttgctaatgcaagcttgtgaggataaacttgtagataaaatacgtgtccgcacttggtttgataatgttaaaataagtgataaggcttttaaagaatggccgaattgttatcacgagctattaaatgagtatgagcgtgatgaaattttgagttatattcagtcatttactgaaatgcatgtcaataatatagtaaaaacaaacaaataaatcattatttgtacatttaatagaggagatgaaggaagaagtgaacgtaccgagtaatcccataacgctcatggcgaaagtataccgtgatgtgtttccggttgtacaccatgagctagcgatgtggaaagagcgtgcctaccatattccgaatgatgagcttcatagtcaggcaatcgcaagtattgagcataaaacgtttcattgtgagggcggtggcattttagctctgctagcaaatgaacaccgagaagaatgtattcgttttatcgtagcgtatcaaacgatcagcgactatttagataatttatgtgatcgcagtacatcacttgatccaaatgattttgccgcactgcatgaatcgatgttaatggcattatcacctgaagtagaaggtggcggtaattattatcgttatcgtgatgatcaagatgatggtggttatttagatgaacttgttgaaacatgccaagatgttttaaagaaaacgaagcactatgacaaaattgctcctgttcttcatgaacttgcttgttattattgtgatttgcaaattcataaacacgtgaaattagaagaaagagagccgcgactgaaaaattggtttgaagcacataaagaaaacttacctgagatgagttggtttgaattttcagcatgtgccggttctacacttggaattttctgtcttgttgcatatgcatttcatgatgaattacatgatgaagatattgcgaaaattagacaaggatacttcccttacgtacaaggacttcatattttgcttgattatttcattgatcaagaagaagaccgtataggcggagatttgaatttctgtagttattacgaaaacgagcaagcgatattagatcggatgaaacactttgtagaagaagcagagaagagcattggtgatttgcctcatgcgaagtttcatcgtctcataagcagagggttacttggtatttatttatcagatcaaaaagtatcagcacaaaagaatatgcacaaaatggcacggcgcattgtaaagtacggaggcctcacttcacgattcttctattggaacgggaagatgtaccgaaagaaaacagcgcagtgatgaagaaaaccactaatttagttaaagacactcttatgagtgtcttttttgttattttgaaaatggcgtattttatcagtatacagaaaataaaaagggtccacgatctgttgtatatagtaggtggtgggctttttcagtagcctcatcttaagtaggaacactttttttcacctatcatacaataacccagaaaataacttgctgttttttgtgaaaaggagtatgacaattatgactatagtagctttaattaccattttattactttcgttatcttctagtatagataattttggagtagggctatcttatgggattcgtaatattcgaataggttttttagctaactttataattgcaattattgcttttatttttagtgaaatgggtattttgtttgggcaatatatttcaaaagtttttccaggtacattatctgacgttattggtacattgtttttgtttgtaattggtttacgaattattttaatgacaattccacaaaaaaagaaggctaatcaagaagtacttgatgaagatgaatctgtttcgaatgttattactggatatttaaaatctcctgaaaaagctgaccttgatagatcagggaatattagtttttttgaatctattgttcttggtattgctatatcgatgaatgctctaacgaatggactaggtgcaggtttattaaaattatctccatttgctatttcattatcagcagctgtattcagttttttcactgtttggttaggagttaaattaggaaaaaaagttgcaaatgtaaaaattggatcttggacattaggacaatttagcacagctttaagtggatttatattattattaatcgctgtacacaatttgttttaagtacaaattgtggtgaatacattggggggatttaattttaatggtgggaagtgtgttattggctggaaagataaaaaagttattaataaaaaagaaaatgccattgaagatagataagtgatctagagagaaataaaaagcatttgtacaacgcgtgtacaaatgctttttattatgatcgtatttttgaaaatacatatataagaagttcaatcgcaaaaatcactaatacagatagtccgaataaaggcatggcagcgcctagtataaccatcatgataaagaaaacgattatgcttttcttatctctttgctttggtggtgctgctaattttcctttcggctttcttgctaaccacatttttactccgtaataaataagaagtagtagagataatgtcgttagtaagcataatattttatttggccatccgaataaatgtccttcatgaagcgggatgccgtaagtgaaccattgtgcaagtaatccataatcacgatagtccgtttttgaaatgaattccccgctatattgatcaaagtaagctgttatctcttcatttggtgcaacatgcatacctgtaataccagaaccgctcgatttcgaaacggtgaatacaccttttggatcagctggtagtgaaataacatatggcttctttatttcaattcctttttgtaattcatcgacagaaattgctttcggttcatttgaattcgattcaggcggagcttcttttcttgttgcccacggcaattcttttacctttgattcaggcggcgccatatacaatttcggatatccgagcgattcattcgacgacgcaattttataaatttggttacccataaatcctgaccatggcaatccagatgcgactagcagaacgagtggaattgtaaatataataccgataatagaatgacgtcgttttgctttttctcgcttattggatgccggtttgtttttgaactggcgtatactcatgtacaacccagtcacgattaaaaagatagtccagcatgccgcaagttctacagtatagttgacgacagtgccaccaactaaaagagaactatgtaattccctcattatattggcaaacgtttcacttgcattttgatccccaacaatttgattattactatctaaatacacatatttttgttgtccagtatactcatttgcaatggtaagtctcgtattataatccccattaaactcactaattttcgccacactataatgtggatattttttctctgttaacgaaatagaatcagccatcgaaatagattctgtttgagcgctcttcccaaaatataaatctttatagatgaaatcttcaacttcctctcgaaataaatacccaattccgctcagtgacaacgtaataagaagtggcgtaataaaaagcccagcataaaaatgccaacgccaaaaaatgtaatgaagcgaacgatttactttcatactttcagttcccctaaccttccctatatgaataactacttatttaatatagcgagattaagtgtgattactttgaaagaattgtgaagaaagttaaaagtttgtgggatttttattaaacataaaacacattttagaaggagtgttttctatgtttatgaagatctctttatatttgataagtacatcctaacaaccgctttcgcaagacattgagaagaatcaacaaaatcctcactagccacaacattcaaatcagtacatgcgataattgcggtatctacttcatccttcaactgcacaatgagcgcgctccataatttgcgagcttcttcaacttctccgcttttaatatacataataatttgattaatcatcgtttgccatttttcataatgaatgtattctatattccgttttgcaatcccgtcttgataaataccagcttgaactgtcgcttccgttgcaagaagagcgactctttttgcagtttcaggaattgcttgtaacgtttcgtcaactatatttaaaatcgggatagaaagagaacgctgtaattcttcaaaataaagatgcgccgtattgcacggcatagcgataaagcttgcgccagtactttcaagtttttgtgctccttcaataatcgcttttttcatcgcttcgtgatcaatagggcgatccatgtaaaacggtgttgggcacgaataaatcatcatatgaggaaagtccatatcatgctttgctccgtatattgtttggcaccctgctacaactgtatcgacgaatggtccagttgattttggccccattcctgctagtattccgatcattgtctcgtctcctttaagaatgtttatatccattatataggagaataacaaaaagacgtgcagtgagtgcacgtctttttttgttatgttttgtcgaatcgtcgatatatccgagaaatcgttgatatattgtaagttatgatagatatatcgaaaaaatcgtttatatatcccgagttacgatagatataattgaaaaatcgttgatatattaccccgcattaacgggcagtaaaactcccaccttaaaattcgcctggagcaaagaagttagttgggaaataaactgcccataaatgcccgattggttcaactaataatcagtggggattccccccactgattaaagtttcactttatcgtttctcaatcgccacaataaatggcgggttgttttgttggttaatgaagccatatcgcagtacgtgagcttgtttttggtctagctcttctgcaaatttgagaacagcgtcgcgttctacttgtccttctgggtgtccgtggtaagtgacgaggacgatgataccttcaggtgccattacttctagtaattgttcaattgccgaaattgttgagttcggttttgtaacgatatgcttgtcaccgccaggaaggtaacctaagttgaagatagcgcctgttacttttccttttgcgtcttctggtagtacggatagaagtgtatcgtgactatcgtgaactaaaacagtacgttcaaaaagttctttttcttttagacgagttgttgagctttcaatcgcttctttttgaatatcaaatccaaatacttttccgctatccccaacaatttcagctaggaagcaagtgtcatgaccatttccaagtgttgcatctacagcgtagtcgccttctttaacagccgtttgcagcagtgtgcgagcaaacggtaatacacgttctaatttcattgttgtttctcctcatttgcatattttccttgccagcttccgcggcgtacaaattctgcatcgatggaatttaatacttcccatttatttaagctccacattggaccaatcattaaatcaggtgggccgtcacctgtgatacggtgcacaattacgtcttctggaataatttcaagttggtcaacaacaagacttacgtaatcctcaagagaaaggaattcgagttgtcctttttcatattgcttcaccattggcgttccttttaataagtgaagtaagtggattttaattccttgtacatcaagtttcgctacttcacgagctgtttccatcatcatgtcgtaatcttcaagtggaagaccgttaataatatgagagcaaactctaatgccgtgcttacgtaatttatttacgccttccacgtaagacggataatcgtgagcgcgattaataaggtttgcagtgcgttcatgaacggtttgtagtccaagttcaacccaaagatacgtacgtttatttaagtccgctaaatattcaacgacatcgtctggtaaacaatctggacgagttgcgatagaaagaccgacaacatctttttctgctagaagcggttcgaatttttcttttaacacttcaagtggtgcgtgtgtatttgtgtacgcttggaaataagcgatacattttccatctttccactttgagcgcattttttctttcatttcatgatattgtgttataacatcatcgcggcgatcaccagcgaagtcgccagatccggcagcgctgcaaaatgtacaaccaccgtaagcaactgtaccatcacggttcggacaatcgaagccagcatctaatgaaactttaaagattttttcaccaaattcatttcgtaaatggtaattccatgtatgataacgtttattgtcgtttgtatatggaaaagggttttgaaccttcattattttccctcctaagccgagtcaaaatgaaacaaaatccattataacatactcataaggtagagatggaagggacacactaaaggggaattgaagcaaggagggacaattatggcagagcgtcaatcacttgaatcgtatattacacaagcggaacaagcggtggaatatgcaaaagaacaattagaacaaggcatgagacaagagcattacaatacgatggagtattcagatgcacagttacaattagaacaagcgtataacgatttacaaacgatgcaacaacatgcgaatgatgagcaacgtgagcaattaaatagagcacgtatggcaattcgccaattgcaacatcaaatgattattacaccgcactaataaggagtgaatgtaatggcgaaacgttcagatcaaaataacccagagcaaaaaacacaaaatggacataacgctgagttttcgaatgaacttgatcccattgttcaagtaaaacagcgtaatagtaaaaaaggacaacctcaaaaatcaaaacaatcagagtaaaccaggtcgaaatatgacctggttttattttgctatatgacaatagtgtaagatttctgtaaggtttgccgatagttgtaattgtccttttccagtagagtaagggaggattaaattttggacaaggagctgctttatggggaacaatattacaaacaaacgaattgatgagttagattacattcgtggcttcgcattactggggattattttagtaaatattttagcactacttaatattaaaactccagatcctaatacagtagatgctagctatcaaaggtttctatacttatttgtagaaggtcgtttcttctcgattttctcattcttatttggagtgggattctatatcttcattacaagagcgattgcgaaagggaaaaatggatatgttctatttttccgccgcgtagttgcattatttatttttggtttaattcatcaaatgtttcagcctggagaagcactagcgttatacgcaatttgtgggttaatcgttttgccgttttataaagcgaaaaaagaagtgaacctagcactaggacttattttgacaattgccttcagtgtaatgggagttaaagaactattaccacttggcttaattttattaggacttgctgcaggacaatatcgtgtatttgaaaatctttcaaaaaacataaagcaagtcgctatttttacaggcattatgtttgttttaagtgtggcagctgtatggtatcaatatggacacgtgcctgctggcccatttgtaaatatgatattgatgaatgaagatggaacaatggatgctgcaagccagtttctaaaaattggtattaatgttggaccaattatttcagctttctatgtaggagcattaattttattacttcagttaaaaccagttcaaacattattagcaccattgaaatactacggtcgtatggctttaacaaattatatcggacaaacggcaatgattttaattgctggtagtgtatttaactttgcaggtaacttaacatacatgcagacgctatatgtatgtatcgcaatttatgcaattcaaattgtgtttagtgtaatttggatgaaaatctttaaaatgggtccattagaatgggtttggcgtgttattacgtactggacggtaacacctttaaagaaataaagtgaaactttaatcagtgggctgttcctttcgcggaacagcctatttttattgtcatcttttgtcgataagtcgatatattttggtaatcgctgataaaagtgtaagaatcgccgatatatttgaaaaatcgctgataaaagtgtaagaaccgctgatatattttaacaatcgccgatataatttcatttaccgatttactatgtcgaaatgtgaactagtatgaaaagccaaccttacacgcatccattttctatcttacaaaagtgtaaggtaattgtaatgttaacaaatagcagttcacttctaaaaagcgcaaaataggtaatggaaaaacaagcgtaggaggatatatatgacgaaaccagttgtagacgtgaaaaacgttcaaaaagtgtacggtaaaaaaggtgagaaccaatcacacgcgttaaaaggtgtatcattctcaattcaagagggtgagtttgttggaattatgggaccatctggttctggtaaaacgacattattaaatgtaatttcaacgttagataaggcaacgggcggcgttgttgaaattgcgggaacggatattacaaaaatgaagcaaggtgagctttcagatttccgttcgcaaaaattaggatttatcttccaagattttaacttattagagaacttatctatttatgaaaacattgcacttccactttctcttcaaggtgtcgcatcacgtaacattggaccaaaagtcgagaaagtagcggatatgttaggaattacagaaatacttcaaaagtacccatctgaagtatctggtgggcaaaagcaacgttcggcagcagcgcgtgctttagtgcatgagccggcaattattttaggggacgagccaacaggagcgcttgattctaaaaatgcaacgagtttacttgatgcgatgacaaacttaaataaagatcaaggcgtatcgattatgatggttacgcatgatccatatagcgcaagttactgtcagcgtattttattcattcaagatggtgagctatataaagaaattcatcgcggtggtacgcgtgaagagttctacaaagaaattttagatgtacttgcagatttaggtacacaaaaggcgtaagaaaggaggttccagtatgttatttaaactttccatgtcggggctgaaaagtaagctgaaagattatatcgtcttacttgtcggtcttgtcatgtcgatttcaattttttacatgttccaaacgttagcactgaataaagcatttttagaatctaattcagtgattaaatctattggattcgtattccaagcaggatcatttttattagcaattataacgttcttctacattttatatgcaaactctttcttattatctcttcgtcaaaaagagttcggtatgtatatgatgttaggtgcgaaaaaacataaagttacattacttatgtttattgaaacaatcgtattaggtgctgcgtctcttgcaattgggattgcagttggagtaggacttgcagaaggtattggacagttattaatgaaacagcttgaatttgctggtgaagggtataaagcattttatctaccatctatgactgttacttgcatcttcttctttgcactatttgtattatcagcaattatgaacagtattaaattgtcacgtatttctgtattgcaactagtacatgcagatgcacaaacagagcgtgttgcagtaaaaggtaaaaagacagttgtagtggcattccttgctgttattttattaggtataggttatgcatctatgatctatatggaaaaactaaaagagatgggaatccttattgcattaattacaacgacagctggtacttacatgctatttggctcacttcttccagtcattattaaaaagttaaaaagtaataaaaagcgtagtgaaaaaggacttaatgcttttacatttgcacaattaaacttccgaattaatagtttaacaaaagtacttgcaacagtggcaatgttagttgcacttggagctggtgcaatttcgggcggtatggcgttcaaaaataacgttataaaaatggtagatggtttagtaatatatgattcagtagttcataatccaacagctgaagaaaagaaaattttagatggtattacatttaaagagaaaagcgaatatcgttataaagttgatgataaatacgtttactatgtaaaagaagatttagagaaaaatcgtcctttcgtaaaagatatggcaaagatgaagtctatgaaggatttagtaaatacgaaaaaagtttcagaggaactaccggtaggtgcagtttctagagagatgaatcaaaaagatgcgaatactaaagaactttcagcggaatggacagatgcttttagtacaatccatccatattatttatacaatgatcatgcaattaaaattgtagatcaaaaaatgtacgatgggataaatggtaaagaaggtatagcatttatcggaaaaacagatgattttttaacatataaaaaagaatggaaaaaacttgacgagttgcagctagataaatataaaaatgtaaaagttgaacaaatggatagtaaatatcaagcttatagtgggttctatggcattgcgagtggaacagtatttatggggttcttccttggaattgcgttcttagcaatgatggcaagctgccttatgtttaaaattctttctggtgcatcaaaagatattacgcgttatcaaatgctgcgtaaaatcggtgtgcgccgtgagttactaacgaaatcgatttataaagagctattcttagtattcttattcccagcaattgtgggtatcgctcacgtattagttggtatgaatattttcggatttattttaatcgatccgtacttccgtatttgggtaccaattgtaattttcgtagttatttatgcgatttattacttcattacagttcaattgtataaaggaattgttcttccgaaagaagattaataataaaaaccgagcaaaaacgctcggtttttattattttcagaaaaaatactttaatgttactgaaatgtataatataatgtaagtaagtaacgtaatataaaagtagaagtagctgtataaggaaaggaggaatccaatctgtagaaagaagctgaacttttatccccacatttttttaccgcaacgtatttatacaatcgtaagtttccacattgaaagttttcagaaccacctgagtatattgtgaaaataatggataacacatggaaatctcatagcatgataaggtaaaatggacaacataatgagaaaattaccgttcataagatgaggagaatacatgtatggaagttgtagaggcattaaaagatataagccaaattgaggctatgaaaaaatatttaaaagagcactcccagcgagattatcttttatttgttattggaattaacacaggattaaaaattacagaactacttagcatgaaatttgaagatgtattaaatgaagacgggactgttaaagagttttatgctcttcctgtgaaagatgaaaaatttaaacaagatatttatttaaatacaaaagtaaaagaagcgcttttagattacgtacaatctattggcgttaaaagagaaaattacgtatttcaatctaataaaacgccaaattcaattacgcgccaacaagcgtatcgtgtaattcataatgctgcagaagcagttggagttgttggtaaaatcggaacgaattcaatgcgaaaaacgttcggatttcatgcgtacaaaagagggatagcgattgcgctattgcaaaaacattttcatcacgcgactccatcagagacactaaagtatttaggtatctcaaaggatgagagctttaaaacggagattgatgtcgatttataaaagccgtaactaaaaaattaggaggcggaaaatatgaatattagagagagtgaactgccgggtattggatgtaagtttgaagtgattacaaaaggtaatgaaaagatggttatcgttattcatgatgatggccgaagagaaatgtaccattttgatgctgatcatgaagagagtatttcaagcgtctctcttcgtgattctgaagcgagacaaattgcagctatattgggcggaatggtatataggccacaagctttagatacgattgaaatggcttttgagggattatcaattgagtggtttaaggtggaaaataatgcaccagttgtacaaaaaacaattggtagtttacatgttcgaaacacatataacgtaacgattattgccattttgaaaaagaatatgaagaagttctttaatccaggcccagattctatcattgaagctggcgatatgctcgtattatcaggtgaaagacatgaagtgaaaagaattattaatgagttgctttcagtaggaggggattcataatcgatggatactttaatctttgaagttggaactgcgttagtattagtcgcttttgcagctattctcgctgcaaagttaaagttctcgattattccgtttcttattatactcggtatgctagtggggcctcatgccccagatttagggcttatcgatttaagatttattgaaagtggagaagttatttccttcctcggccgtgttggcgtcatattcctcctattttacttaggtttagaattctcaattaaaaaattaattaaatcaggaaaatcaattgcttttgggggaactgttcatatatcgcttaattttatattaggtttactttacggatatataatgggtttccccttattagaaacattaattattgctgggatcataacaatttcatcgagtgcaattgttgcgaaagtaattgttgatttaagaagatctggtaataaagagacggagctaattttaggaatcattatgtttgatgatatctttttagcggtatatttatcagtcgtttcaggattagtacttggaggggcaacatcatttgtaggtgctcttacatctattttaatcgcagtaggttatatgctactattctttgtagttgctaggaaagctacacggtttttaaataaaatgttagatatttcgtccaatgaaatttttattattgtaatattcgctattttgttctttgtagcaggattttcagaaacgattcatgttgcagaggcaattggagcattattactaggactcgttttttctgaaacagagcatagtgatcgaattgaacagcttgtcgttccgtttcgtgatttctttggagctatattctttttcagcttcggtttaagtatagacccattttcacttggcggagcagtgtggttggcattaggagcagttttcattactcttatcggtaattttactgctggaatggttgcggggcgtaaagctgggttatcgcataaggcttctacgaatatcggtttaacacttgtatcacgcggagaattttctattatcgtcgcgaatattggaattgcgggtggcttaatggcagcgattaaaccgttctcagctttgtatgttttaatattagcatcgttaggacctttgttaacgaaagaatctgggagaatatactcgctactagataaggtgtttaaatggagtgctaaagaacgtgtgaagcgagaaaaggaagttggatagtacaaataagggtagactgcatgaaaatttcatgcagtctacccttttatatattgttactgttgtcgttttttgtcggtaagtcgatatattttaataatcgctgatatatttgtagttgcgccgatatattctgataatcgctgatataatccaagaagcaaccaatataaattcatttaccgacgaactattatctgaatttcatcaactattaatcagttgccttcctatttaaaaacgactacaattttactgttatatatatgaacgaaaaaaatagaataggaggggaagctatgccaaggaaagtatggctattagtagctgggatgattattaatgtcacgggtgcttcttttttatggccttttaatacaatttatttacatgatcacttgggaaaatctttatctgtggccggaatggtattaatgatcaactcgcttactggtgtaatcggaaacttgctcggcggtgttttatttgataaatggggcggttataaatcaactttagtagggattgtgattacacttgtatcaattttaggtcttgtgttcttccacggttggccgttatatgttgtatggctagcgttaatcggcttcggttctggaatggtcttcccatcgatgtatgcgatggttggtacggtttggccagaaggcggaagacgggcatttaatgcgatgtacgttggacaaaatgttggtattgcgatcggaacagcatgtggtggattagttgcatcgtatcgttttgattatattttcttagcgaactttattttatactttgttttcttcttaattgcttttattggattccgcggtatggaagacaagaaagagccaggagtgcaaaaagaagtcgaaacgaaaaaagggtggtcacttacacctggatttaaagcacttcttatcgtgtgtgtagcatatgctttatgctgggttacatacgtacagtggcaaggagcgattgcaacacatatgcaagaattgaatattagccttcgtcactatagtttattatggacgataaacggagcgatgattgtttgtgcgcagccacttgttagtatgctaattcgctggatgaagcgttctttaaaacagcaaattatgattggaatcttcatttttgcagcttcattcattgtgttaagtcaagcgcaacaatttacgatgttcctcgttgcgatggtaacattaacaataggtgagttatttgtatggcctgcggttccaacgattgcaaatatacttgcaccaaaagataaattaggtttttatcaaggggttgtaaatagtgcggcgactgtagggaaaatgttcgggccagtcgttggcggagcaattgtggatttatacaatatggaagtattgtttatagcaatcatggtaatgcttgtagtagcgcttatagcaacgagcatttatgataaacgagtaaaagtagaagaaacagttgaagaaaaaattgcagtttagtttgacggaacatgtaacatgttttagaatatatttaaataaaacaacctttagaacaagggagatagctcggctgtcttaagatgaattcgttagttattaagagtaacgattaaccgagaagtcctcgctttaagtaagctcttaagagatactaggtgaaggatagttcacgtaacttatatgtgtaataacagtgagaaggagtagtagtaatagaagctggtttagagagttgacggtcggtgcaagtcaatccacgtttcgttatgaactcgcctttgagttgcagttgtgaaactaatagtagcaattgccgttaatccacgttacggatctaagcgaatgtatatttgtacattaatttagggtggtaccgcgggaatctataacctctcgtccctttttagggatgagaggttttttgtattttgggcggtgaaaataaatagaatttcaaggagggtatctcatgagctttaatcatcaagaaattgagaagaagtggcaagggtactgggaagagaataaaacattccgtacgccagatgagacagaaaaaccaaaattttatgcactagatatgttcccatatccatcaggtgcaggcttacacgtaggacatccagaaggttatacagcgacagatattttatctcgtatgaagcgtatgcaaggatataacgttcttcatccaatgggatgggatgcatttggtcttccagcagagcaatatgcacttgatactggaaacagcccagctgaatttacagagcataatattaatacgttccgtaaccaaattaaatcattaggtttctcttacgattgggaccgtgaagtaaatacaacagatccaaactactataagtggacgcaatggatcttcctaaaactatttgaaaaaggcttagcttacgttgatgaagtacctgtaaactggtgcccagcacttggtacagtacttgcaaacgaagaaatcattgacggtaagagtgagcgtggtggacatccagttgagcgtcgtccgatgagacagtggatgttaaaaattacagcttacggagatcgtctattagaagatctagatgagcttgattggcctgaaagcttaaaagatatgcaacgtaactggatcggtcgttctgaaggtgcagaagtacacttcaacatcgatggtacagacgagaaattcacagttttcacaacacgccctgatacattatttggtgcaacatactgtgtactagctccagaacatgcacttgttgcagaaattacaacagcagaacaaaaagaagcggtagaagcttacattaacgctgtaaaaatgaagagtgatctagagcgtacagaacttgcgaaagaaaaaactggtgtattcactggtgcttacgcaattaacccagtaaacggtgagaaattaccaatctggattgctgactatgttcttgcaacttacggaacaggtgctgtaatggcagttccagctcacgatgagcgtgactatgaattcgcatcagtatttaatcttccaatgaaggaagttgtaaaaggcggagatattacgaaagaagtgtacacaggtgatggtgcacacgtaaactcagcattccttgatggtttaaataaagaagaagcaatcgcaaaaatgattgaatggcttgaagtaacgagcgcaggaaatcaaaaagtaacgtaccgtctacgtgactggttattcagccgtcaacgttactggggtgagccaattccagtaattcactgggaagatggtacaatgacagctgtgaaagaagaggaattaccattagttcttccgaaaacagaaaacatccgtccttcaggtacaggtgaatcaccacttgctaacattgacgagtgggtaaatgttgttgatcctgagactggtaaaaaaggtcgtcgtgaaacaaatacaatgccgcaatgggctggtagctgttggtattacctacgttacatcgatccaaacaatagcgaagcacttgtagatcctgaaaaagtaaaacaatggcttccagttgatatttatatcggtggtgcagagcacgctgtacttcacttactatatgctcgtttctggcataaagtattatacgatatcggtgtagttccaacgaaagaaccgttccaacaattattcaaccaaggtatgattctaggtgaaaacaacgagaaaatgagtaaatcaaaaggtaacgttgtaaaccctgatgatatcgtagcaagccacggtgcagatacacttcgtctatacgaaatgttcatgggaccattagatgcttcaatcgcttggtctgaaaatggtcttgacggagctcgtcgtttcctagaccgcgtatggcgtctattcgttcaagataacggtgaattaagtgagaaaattactgacgcaccaaataaagagcttgaaaaagcttaccatcaaacagtgaagaaagtaacagaagactatgcagagcttcgcttcaacacagcgatttctcaaatgatggtattcatcaatgatgcatacaaagctgaaacacttccaagagaatatgtagaaggtttcgtaaaaatgattgcaccagttgcacctcatatcggggaagagctatggagcaaacttggatacaatgaaacaatcacatatgcaagctggccaacatttgatgagtctaaacttgtagaagatgaagttgaaatcgttgttcaagttatgggtaaagttcgcgcaaaactaacaatgagtaaagacgcatcaaaagaagaaatggaacaacttgcacttgaagcaattcaagaccaaattgaagggaaaacagttcgtaaagtaattgttgttcctggaaaacttgttaacgttgttgcaaactaaatcatttgaaaaagctcagagcgtttatgttctgagcttttttgtatagaaaataatctcagggtcaccttcatctaagttttcaactattccgctacgtataaaaccattcgagttaaatactttctgcatactttcattcgattcgttcgttgaagaaaatattttttgagtaggagaatgacttaacatatatgagattaacgagcttgcatagccttgccttcttttagttggtgaaacaatgattaatgagaggaaagtacaaccaaagaaatttgtatcgtatgttagaaagccagagatagaattttcttctgttacaatgatgcatctgccttcacggatagtgtgcttaatataatttcgtctactatcgtttccaattacgtcaatatctatatggacgattgaatctaaatcattgatagaagcctttgttacattcttcaatataaatacctcctagaaaaaatattcagttaattaattttatcatgaatgaagaaaaagaagcggaattctagtgcagacaaacacctattcttctataggaaatatgataaaaaaggtaggctaaattgagtagaagaggtgaaaggaatgaaagggatggacaataatgcaccacatggtttcttcgggagtggatcggatagttatgaacaaatgatgttaatgggaggaggacaacaaggatacggtggaattccgagctggatgggcggaacacctggagggttttctacatcagtagcgggtgtacaaactggaattccaacattaacaggaggatttccatcatcggtagccggagtgcaaactggaatcccaacatttgttggcggagcagcgggaggagtaccagtaggcgtaccaactgcatttccatctttcgttggaggagtacagacaggatttcctgtaccgggagtaggtgttgtagcaggaggagtaggtggatatccgcaagtagttcacggctaccatggtcatcatcaccaccatcaaggtcaacatggccatcatggacatcaccaccatcaaggtcaacacggccatcatggacatcaccaccatcaaggtcaacacggccatcatggacatcaccaccatcaaggtcaacacggccatcatggacatcaccaccatcaaggtcaacacggccatcatggacatcaccaccatcaaggtcaacacggccatcatggacatcaccaccatcaaggtcaacacggccatcaaggtcatcaccaccatcaaggtcaacacggccatcatggtcatcaggggcaacaagtacatcaccacggtcaccaccacattcatccgcaagctgttctttatcaaactcaccaaggccaacatggtcaccatggacatcaccaccaaggccaacatcatggacaccaaggtcaccaccatcaccaaggtcatcaaggccaacacggtcatcatgggcaacaaggccaacatcatggacaccaaggtcaacatcatggacaccaaggtcaacatcatggacaccaaggtcaacatcatggataccaaggtcaacagcaccaacagcaccaacaatatcagcaatatcaacaacaacaacaatcttctccttggacaggtggaattggagcaggaggagcaggggcagcagcaggagcagctagtattagtggagcagcaggacacgcagggcacgtgggtcattaatgattggcagaaaaaaagccataataaaaaactgctaggaaatcctagcagtttttttcagcttcttgacgctgacgttcaatttcagcacgaagttgtggttccggtgcttgccagccttctggctttagaatcttaccgtcgccttcacggaatcgaggtttcccatcagggaatagttttgccatgttggcgttgtttacaatttcgaatcctttatctggacgtacacccatttcggcaaacgttccgaatgcaaagtaaataaggtcaattagtgcatcgtattgatcttcaacagtcgttgcctctagaaattcttctagttcttcctgcataaaacttgcacggatttttgcacgctcttctgttaattttgttggagtatttgtcacaggatgtccgaatacttcatgcattttcgcaacaagttcgtatcctttatctaaacctttttcgtttgtcatgttgtttcatcctttcttacgttatgccgaagtttattgtaacataaggtgattatgaaatgaaaagaacatcttattgaaataagatgttcgctcgttattcttctttttttattaaaagcgatgaaataagatcgatgccaaaaataccgacgagtaacattggtataacgacaagcaagtaacgtgtgaaggaaacattttttaagtatgtatgagcaaataaaaagacgccgagaaataaaataccatttaaaataggctttactaattttttagacataagctcccccataaatatcttctctctctatctaaaataaaaactcctctctccgttgtatcatgctggagagaggagttcaatcatttctcattcaattacaccagaatttgtaatattcacggtgtattttatatgaactggaacatctttatacatttgtctccattcttctaatttgaatgggcgataatgttgcttatactttgcacctagcccgagaggatcgacgcctaaagatttaaattgcttaattaacttagcagcttgtttatctaattgtttttggacatctttttcaatgttttttgtgttcttgttattttctaagttaatttgctttgatagttcttgaatacgtgcgtcaagacgaacgtgaatgaaaaaagaaggctttccgtttttaatttttatatcgtaagttggaacagaacgaatattattaatcattacgtacgcagaatctgttttaaattcatgtgaatctaatttatgtttctctaatagtcctttaaatatgaacatatctttttccgcaattttaccgatatatttatcctttttaaaaagaccaattccagtgatttttattttatcaccatgcttctttagaatgggaatatagtagtcttgcccttcttgataataacgaaatgctcctacatgcagattatccgttggtaaaggaccggtctccatattatgttctaacaacttttttatataaattgcaacgttgtatgaagtggaatatttgccttttaaaagttcagtaccattcccctctaataaagcggcatataaagcgttccctatattcacatctcgaagtaatgtatcgaatgaagtagacattcctgttttggcaagtcttatcgtatatagagcgacacgcatttgtccactagcaaaaggttgagaagattctaatgatgtatctgcttttacttgttttaccgcatttgcagttccttcaaaaacttgaactttatttccttttttctgaatggggcaaacgaatgtcacttttactttgttgccttttgcaacgtcaaatacggatccttgaataagttgtacatcgtcgataatatttttttgtaaacatccaattagactgaagaatgttatacaagaaataagtattaatttgcttgtgcttttgattttttccattttcttttcacccacacaataataaataggattgggatgtatacataaatgagccaaaaactaacctttgatacattactaataaagttattaatatcgtgtctgtttgttaaaagttgtgaaacaatgagggtgataaggataaaagcgattaaaacccctctttgttttacacggaatatttcatgagttgctctcattgacgcccataaagggaggataaaacttgaaataataacgagtgcgtagcctgaaattgcaatatattcgagtctttctataaatggtaattgaatgacttgggtcatagaaagttgtgcccatatcgtttttaataattgtttttcactaaaaaatgcaaaggctaaaagggtgctaaataaatatagaagatttgaaaatagtgctccaagctgagcgtatttatgagattgcataggctttttcacaaatggatataccatgaggtaaatctcaaaaccggtcatactgtagattgacagttgagcggattttaaaatgtctgaaaaagaatgtgtgaatataggtagtaaattatcccaatgtgaatatttcaaaacgaataagcttagaaataaatatcctaatgtaccaccaacagagatgacacaaatgccagtaatgacacgaaatccagaagagataatgtaatagctaactaagcataaaaagagtgttaacataaaggtggaagcggtaggaaacatccatacttgaataatttcaacatatgttcgaataaccgaaatgctgacgtttaaaaaataagctgcaaagatgatattaaagatattccctatccactttccgaacgtttgcctttgtaaatcaattaaatttccatttgtttcttttaataaaaaatacatcatccatataaggagatggatacagagtcccgtgattagaacgcccatccatccgtcgtatccagcggcctttgcgatgattcgagcgaagccgagaacgccagcaccaaactgtgcaccgtgaattaagaagaaaacaaagacaggagatatttgatatttttcttgaactttactcatcaatgcacctcatttcttaatcatcaaaatccgatctatgttttgttgaaattcctttcgcagctttttttacatgttgtggtcttgcttgtacatctcttgtatcaatcattgttaaaggaaaacggatccaagaatctttaacagattgttgtcttgttggatagaacaaagcgtacggcttgcgtaaagaagtaagtctaaacagatgggtgaataaaaagataaatccaagtgaaataccgaaaagtcctcctatttctgcaaatatgagaaacgggaaacgtagtaatcgaaccgcattacccattttataaataggtgtaataaaggaagcgagtgctgataaggcaacgataattaataaaatattactcgttaaacctgcttgtacagatgcttgcccgattacgataccccctacgataccgagcgtttgaccaactttcatcggtaaccttgcgccggcttctcttaataaatcaattgcaagttctaaaaagagagcttcaattaaaggcgggaacggtacttgtgctcttgataaaattaaagtttcaagtaaatcactcggaataagttcataatgataatttaaaactgcaacgtataacggtgtagcgcaaattgaaaatagaacggcaattaatcttaaaacccttgaaaatgtagcgtacatccaggagacgttatagtcttctggtgaaatgaaaaaatcgaaataggataccggtgttagtaaaacactcggagaaccatcaacaaaaatagcaattttcccatcaataagcgcttttgtaactctatcagtacgttctgtattgatatatagagggaaaattgatttttcacccatcaattcttgtatataagcactatcattaatttgatcatattcaagagcgcgtaatgattcctcgagaaaatctacattatctttttcagcgaggttgtctaaatacatcatgacaactttcgttttggaaaactcgccgataatcatttcttttgtttgtaaatctaaaacaggcagacgttttcgaactaaattaatgtttgtatcaatagcctctacgaaaccttcttgcggaccaataacagttgattcgtttaaaggaggggttggtgcacgataattatcaattgcaatgtttgcaagcatacatttttgatcttgctgattcaattgaatgatcgcatgtccctttaaaaccatgtcttcaattttttgcaagtcgttcgtaattgtaatgccactcatcggaatatgttcttttagttcttctagcgaagtacaaggtctctctaaaagagtaggcattaaatatttttgtaatttctccccatcaagtgaagggcgatagtaagaaatccaataaggcatcgtttcatcgtcagatgtatggtaattaataaaatcactagactttttaagtttctctattaaatcttgtagagaatgaatacggtctttttctggttttgtaaagtcataaatactattacctccagagctttgttgcttactttgagaaggttcatcttgcttagcgttttgttgtttatcttgagacgaatcaccttgtttagcactttgttgtttatcttgagatgaatcatcttgtttagcactttgttgcctatcttgagacgaatcatcctgtttagagctttgttgcttatcctgaaacgaatcatcttgtttagagctttgttgcttatcctgaaacgaatcatcttgtttagcgctttgttgcttatcctgaaatgaatcatcttgtttagcactttgttgcctatcttgagatgaatcattctgtttagcgctttgttgtttatcctgtgaagattcatctcgtttagatttttgttgtttatcttgagatgaatcatcttgtttagcactttgttgtttatcttgagatgaatcatcttgtttagcactttgttgcctatcttgagacgaatcatcctgtttagagctttgttgcttatcctgaaacgaatcatcttgtttagagctttgttgcttatcctgaaacgaatcatcttgtttagcgctttgttgcttatcctgaaatgaatcatcttgtttagcactttgttgcctatcttgagatgaatcattctgtttagcgctttgttgtttatcctgtgaagattcatctcgtttagatttttgttgtttatcttgagatgaatcatcttgtttagcactttgttgtttatcttgagatgaatcatcttgtttagcactttgttgcctatcttgaaatgaatcattctgtttagcgctttgttgtttatcctgtgaagattcatcttgcttagaactttgttgcttatcctgagaagattcatcttgtttagcgctttgttgtttatcctgagaagaatctttttgctcgttatttttacctttattatgttttatacttctagtctgttctttgttatcatcctcttcattgttagaatgctgctcctggttatctctttcgtttgcttctggtttatttaatttttttttcttacgtaaccaattccaaatcatatgtatgccctctttaatcttgtaatatagtgctattttgtggctaattttgtatattattcatttatttatgaaaagaagaaggagattagttgcatggaaaaaaatctttagtaagcagttcatactataacggggagagggagagtctgtgcaaattgtaaaaaaagagaagtttgttttaaaagagtttacgtttgaaaatggtagggaaattcctgttcaaatgggatacgagacatatggtacgttaaatagagaaaggtcaaatgtgattttggtttgtcattattttagtgcaacaagtcatgcggcgggaaaatatacagtgcatgatgaggagtctggttggtgggatgggctcattggacctgggaaagcaattgatacaaataagtattttgttatatgtacggataatctttgtaatgtgcaggtgaggaatccatatgtgattacaacaggaccgaaatcaattaatccagaaactggagaagaatatgctatggagtttccggtttttacatttcttgatgtagcttgtatgcaatatgagttaataaaaggtatgggaatttcaaggttacacgctgtaatcggaccgtcggcggggggaatgattgcacaacaatgggcggttcactatccacatatggtagagcggatgattggcgttattacgaacccacaaaatccaattattacgtcagtaaacgtagcgcaaaatgcgattgaagcaattcaactggatccaagttggaaagatggaaaatatggagaacagcaaccgataaaggggcttcatttagcaaatagaatgatgtttatgaacgcgtttgatgagcatttttatgaaatgacatttcctcgtaatagtatagaggtagaaccttatgaaaagttttctacactaacatcatttgaaaaagagataaataaagcgacatatacaagtttagagctagtagatgcaaattcatggatgtatactgcgaaggcagttttattgcatgatattgcacatgggttttcttcactagaagaatctctttctaacatagaagcgaatgtgcttatgattccgtgtaaacaagatttgcttcagccgtctcgttataattataaaatggtagatattttgcaaaaacaagggaaatatgcggaagtatatgagatagaaagtataaatgggcatatggcaggagcacttgatatttatttatttgaaaaaaaagtttatgaatttttgaatcggaaagtatctagttttgtgtagaagaaaaatgatggggaaaaggtgcaatgtttgtagtaggcaccttttttcacatgatttgtagacggaaaatatatgtagctattgctataccaaagaacgctatgctaagcaatagaaataagaatgacatttcttgtgaggattttatttttttattatttttcatactgagagtaataattgcagcgattaagaaaatgatgcccataatgaaaagggaaagtgtcattttcattggctcctttcataaaacaagtatattgaggatacaatgcaagagttatgtttgtaaagaataagttttgcgggaaaattgagaaatagtttttcgattctttgcgttctttcttttgcatgctaaaattggtagagaatgtttgtgaaaaagaaactaaaggttttattgtatataaggaggaactacatatgacagaagttaaaacaattactacagaagaagtgcaagagcgtttagaaaatggagaaacgttatttttagtggacgtaagagaagatgaagaagtagcggcagggaaaattccagaagctgtacatattaaaatgggtgatatcccacataaagtagatttctttaataaagagaatgaatatatctttatttgtcgttcaggaatgcgcagtgaaaatgtatgtcattatttaaatgagcaaggatttaaaacagtgaacatggtcggcggtatgcttcaatatgaaggtgaaacgaaatagtaaatagttaaaaacttgaaacgagtatgtttcaagttttttttcttttgcatacagtatataaaaggaggatggagaagatgggaattaacatgcgtaaagtaaaaattataaataatacaggagctgttaatgttggcgattgttatgatctctcaccttttgctgtatcaaaagcgtatgcgggtgccggaggggcgagtgcggctatttttttaaatgggaaaaggcagccagaagcggtaattagaacatcagtatttcttccaccattagcaacaagtacacgtacgttaggttcgtaaaggaaaggtagtgtgtaagtatgccggcacatataaaagagtttgttatcgttaataatacaggaaatatatttacgggcgataatttaagagacacttcatttactgcttcgaaatcgtatagtggttcaatggggtgtacttggattgatgttgttactgtaatagggacggagacaaagctttgtttacagccaggagattctgtcacaacaacgtatacgagaggtactcctgctggtactgtaacaggaacgaatactgggcaaggtgcaaatgtgtcgagtactatgcaggcggtgccaaatatagataatatggattcagttgctggactcccttaaggaattaagggagtttttattatttaaaataaaaatagtcttggaaattatttttgaaaatagattaagaagaggtttatttattatgaaaaagaaggtttgtaggtggtgaaagtgtgaagaaacgtgataataatgggaagcaaaattcgttaagctctaattttagaattccacccgaacttattggacctactttccctcctgttccaactggatttacaggtatagggattactggcccaacaggtccacggggtccaactggtcctcaaggaccgagagggttacaaggtccgatgggggagatgggcccgacaggacctcaaggtgtgcaagggatacaaggaccagttggttcaataggtgcaactggaccagaaggacagcagggaccacaagggttaagggggccacaaggagcaacaggagcgacaggtttacaaggggtgcaaggaattcaaggtccgattggttcgacaggagcaactggagcgcaggggatacagggcgtacagggattacaaggtccgattggagctactggacctgagggacctcgaggaatccaaggtgtgcaaggagtgccaggggtaactggtcctcaaggaattcaaggagctcaaggaattcaaggggcacaaggactaactggaagtacggggttaacgggagcaactggtcaggggataacaggcccgactggaataacaggtccaactgggataactggaccatctggaggacctcctggtccgacagggccgactggtgcgacaggtccgggcggtggaccgagtggaagtacaggtgcgactggagcaactgggaatactggagctacaggaagtacaggggtaacaggagcaacgggaagtacaggtcctactggaagcacgggagcacagggcttgcaaggaatccaagggattcaagggattcaagggccaattgggccaacaggtccagaaggtccgcagggtattcaaggtattcctggtccgacgggagtaactggtgaacaaggaatacaaggagttcaaggtattcaaggggtaacgggagcaacaggagatcaaggtccgcaaggtatacaaggggctataggaccacaaggggcaacaggggtaacaggagatcaaggtccacaaggaatacaaggagtaccagggccatcaggagcaacagggccacagggagttgaagggatacaaggtccgatgggtgatataggaccaacaggtccagaaggcccagagggacttcagggcccgcaaggaatacaaggtgttcaagggccagttggagcgacgggtccagagggtcctcaggggatacaaggtattcaaggaccggtaggagcaacaggcccacaaggtccacaagggattcagggaatacaaggtgtgcaagggataacgggagcaacaggagtacaaggagcaactggaattcaagggatacaaggggaaataggagcaacgggtccagagggtccacaaggagtgcaaggtgctcaaggggggattggtccaacaggtccgatgggttcacaaggagtgcaaggaatacaaggaattcaaggcccaacaggtacacaaggagtgcaaggaatacaaggaatacaaggaattcaaggtccgacgggggcaacaggagatacgggagcaaccggggcgacaggggaaggcactacaggcccaacgggagtaaccggtccaacaggcgtgactggcccatctggtggaccagcaggaccgaccggtccaacggggccatcaggtccggcgggagtgacaggtccatctggtggaccacccggcccgacaggagcaaccggggcaacaggagtaacaggagatactggggcgacaggctcaactggagtgacaggagcgacaggagaaacgggagcaaccggagtgacgggtttacaaggtccgcaaggaatccaaggagtgcagggagagataggtccgacgggtccccaaggtgttcaaggtccccaaggaattcaaggagtaacgggggccactggagatcaaggtccgcaagggattcaaggcccacaaggcgacataggtccaactggcccccaaggaattcaaggcccacaaggttctcaaggaatccaaggagcgacagggggaacaggagcacaaggcccacagggaatccaaggtccgcaaggtgacataggtccgactgggtcacaaggtccaactggaatccaagggatacaaggagagataggaccaacaggtccagaaggcccagagggacttcagggcccgcaaggaatacaaggtgttccagggccagttggagcaacgggtccagagggtcctcaggggatacaaggcattcaaggaccggtaggagcaacaggcccacaaggtccacaaggaatacagggaatacaaggtgtgcaagggataacgggagcaactggagcacaaggagcaactggaattcaagggatacaaggggaaataggagcaacgggtccagagggcccccaaggagtgcaaggtatacaaggggcgattggtccaaccggtccgatgggcgcacaaggagtgcaaggaatacaaggggttcaaggagcaacaggtgcacaaggagtgcaaggaccacaaggaattcaagggatacaaggtccgacgggagcaacaggagatacgggggcaaccggagcgacgggagaaggaactaccggcccaacaggagtaactggtccaacaggggtgactggcccgtcaggaggaccagcaggaccgaccggcccgacggggccatcaggtccggcaggagtgacaggtccatcaggtggaccacctggcccgacaggagtaacaggtgcgacaggagtaacaggagataccggggcgacaggctcaactggagcgacaggagcaacgggagcaacaggagtgacgggtttacagggcccgcaaggaatccaaggtgttcaaggagagataggtccaaccggcccacagggtattcaaggtccccaaggaatccaaggagtaacgggggcaacaggagcacaaggtccacaaggaattcaaggcccacaaggagagataggtccaaccggcccccaaggaattcaaggtccacaaggtcctcaaggaatccaaggagtgacaggggcaaccggggcacaaggcccacagggaatccaaggcccgcaaggtgatataggcccgaccggcccacaaggcccccaaggaattcaaggcccgcaaggaattcaaggtccaacgggagctacaggagcaaccggagcgacaggtcccctccagataaaacagtattgagtccatcatatcagatggactctttttttactgtctacctataggggataataccagaaggttgatatggtgtctcttttttatgaacctggagaggtttgaactcaagaaattaattctataaattttatattatgattttttggtttatgacatacagctagttgtaacagaggaggtactgtattctatgttttcttatgcggatcctataacgtagaaaggtaaaatttctggaccagattttaattagtgttccttcagctttaatgaggaggtgtacgaagatgttgtgactatacctgctgggtattattaattgtgaagtcaaataagaaaacaatttattagaggaagattagttagtttaagtatcagatttaggtgtttaacagggggtactaattaatttcagttctttcatgaaaaattatagaaaaagtatggataaacaaattcttgttttaagtgaattttgtgaatgtgggggctgctttaaataaagatggtcaaacactatgtaaataattaggaatgttaaaatatgcaaaattgcatattaaatattttaaatcttatgctaaccttataatgcgaaatataacatttgttggtaattattcatttttgaaagataaaaaatgaataattacagtgaattgtataccactgtcctatagtataaacgataataacgaaagctatttgaagtcctttgaaggaaataagttattgaaaaaaattccatatagaaaatttgttgaaatttcagatgtaacaaatgtcattttatttttaatgtctgataaaagcgatgccattagagggcaaaatattgtggttgactatggatatacaattgtataaataaatcatcttgggaattaagggtgtggataatgagtttactaattaaagatttaacaaagaaatttgacgagcatgttgcagtggataatttgaatatcgagataccaaaaggtgaaatatttggattcttgggcgggaatggagcaggtaaaacgactacatttcgaatgatacttggacttttatcgaaatcaagtgggaccatttcatggaatggtaaacctataaattatggtgttacagataaaattgggtatttaccggaagaacgtggtctttatgcgaaaatgactgtcaaagaacaagttaacttttttgcaaaactaaagaacatgaaaagtaaagatgcagaaaaagaacttcactattggctggagcgttttaatattactgagcatctgaacaaaaaggtaggagaactttctaaagggaatcagcaaaaaatccagctgataacagcgattatacataagcctgaactcttaattttagatgaaccatttagtggtttagacccagtaaatgttgaaatgttaaaagacgctgttcttgatatgcaaaaacaagggtcgtcaattctttttagttcacatcgtatggaacatgtggaagagttatgccaacacatttgtattatgcacaaaggtgtacctgttgttcagggtgacattgccaaaattaaaagtgattttggtaaaaagaacgttgtaatcgttggcgatcatgactttgaccatttgaaagaaataaaaggtgtagaaagtatgaagaaacgtaaaaatgcagttactcttaaaatttcatatgaagaagtgtcacatgttttatttaaagagataacaaaattagggtatgttaaaaagtttgcagtagaagagcctacattaaatgatatctttattgcgaaagtaggtgcacaaaatgaatagtttctggacaatttttttacaaaactataaatctaaagtgaaatcaaaatcatattttgctattacaataatagtttctatgttaattataggattgatgaattttgacaagatttataacttgtttgcaggtaacgaggacgatcaagttgttgttgttacagaaaaagaagaattatattcaaccattcatcaagtgtttaaaaatgtcgatagtaagatacaagttaaacgtagcacggataaacaaaaagcagaatcaggtgttaaaaatggtgattatacatatgcaatcgttgtagaggaattgaataataaacaattaaaggctacgtatataactgagacggatgtaaatcagcaagatgttagcaaggttcaaacgattttatctcaaatacaatcttctaatttcgcccagcaattgaatctatctcaagatgaattaaaggtgttaacaacgccagtagaaattcataccaaaacggtttcagataaggttaaagatggagaacatactgagggtgtagggattttaattaatgtctttatcatgctaaattatctaatgatattaatgtatgctgcacaattagcaacagatgttgcaacagagaaatcttctcgtgttatggagttagttgtttcaagtatttcgcctaccaaacatttatatgcaaagctattctcaacattattggctggtattacgcaaatcataatttggggcttggtcgcaactgttggatataaaacagcaattaatgattcgaaaaatgatattttaaatagtattgatttaaattctgttgctccaactctagtgttttatgggattctattcttcacattaggattcttattatatggctcattatcttgtctatttggctctatcattacgcgtatagaggaatcttctcaagctgttatgccgctgatgtttatgttacttgctgctttgtatatagcaatttatggaatgtcaaacccaagcagcatggttgttaccattactagttatgtacctttcttcactcctattgttatgcttgtacgaattggattcctcaatatcccagtatgggagattgcgcttgcattagcaattctaattgcaacaatatgtatgatgattggtttaacgagtcgtgtttaccgcggtggcgtattaatatatggtaaaggtgcatttagtaatatcaaaaaggcaatcaaattagggcgaaaataggattcgtctattcatttctaaacttaaatttacaaagatctgcatagttaaactgtgtagatcttttttgttgagaaatttatataaataaatataaaaattgctgtattaggctatttttcaaagagaattttaaaaagctcccaaaagagagtaaagaatcgagttctagcgaacaacgtagagcgataattaatataatttatgtctttctccaaaatggagaaaagaagtagggaaaaatttagttttaataataatcatttatttgctacataaagaaaaccccttgactatcaaggggtttttcatatgaccccggagaggctcgaactcacgacctccaccctgtcaaggtggcgctctccctgctgagctacgggatcccaactataaatgttaccatcagcaatgtattttcatttcattcgtgtaatcggagaatttgtacaatttgttgagtattgtaacatttgatgtattcctataatagcaacaaactttaatggtgtaaaggtttaattttccgaatattcatattctaatttttgtataaaaaaataagccccgaagagcttattttaataataatatcaacgcaattatcaatgatattttcaaaaatacaatcataaataatggagcttgttcataagctatcgtcctgtaactgtcattcctgctgtgtaaattgtatcaatagaaccgtcagcgccttttatttcgactttataacgatatgttccatcttcataaatatcatcgccatatcctgtgaaagttgcaatttcatcattgcttccagctgggacccattgattttgccaacggaagttggtttcaaattctccccatctatcgccatatttcttttcaaggctgacattgtaatgaatttcttcagctcggtcatttgtaattcttgcaattacgctgttaccaaaagtaacttgtgtagagtgtacctgaactgtaacaccgttcaccgtttcaccaggaccacaaatgtaatgacaaccatcccattcgtcagcatgtgcttttggtgtatcaatgttcataaccgttaaaccgcctaaagctaatgcgccagttaataatactttacaaaatgttttcacttgaaattccccctaagtatattctcaattcgttcgatagatatcacattaatctaatggaacgttttttccttaagtgtattcgctatgaatctttcatcttgtagtaatctaatcactacataaaatttcatagttttgattccatatatgtatcatgatttacatagaacaaatctgttaatacgttttggttatttgcttatcccactacttttattaccttttattggtaaaacgttgatttaattatataccattattatctatttacaagagaaaacaatactgtatgcaaaaatgcataatacaagcagtgttgggtttcgattaatatttgagtggaatctaatgctaattttttatgtttaacagtataaatctatcaatgtttattaaagtcataattgataaacattgtccagggggcgcccttcatgctgagatacaggatcttcaaaagggaaagtataagcgattatgctcgtaatgtatgaagggataatgatgagaagaaaattcagtagaaaatagtttttgaatgtagctgttatattatttccggtatttatctaaaggattttcatcgcttaaatcaacaattaaagggcataaaaataacagtggtaaagcggcgttagcttgatgaaaagtatcattagacatatattgcctcccaaaacaatacggacaatctttttcaaatgtcacgagtatcgaccatatgtcttttactttccacttctttttacaatacgtacaacgcgccattgagttcctcctcagtttaaggtgttttctaatatattctactttattgtacgaaagtcatttgaatttgatgtggtaaaatgcaaaacaagcctaacctcgttctacacttagggaggggttaggcttgttttaattccgttcaaagcctctttgtatcaggccgtttatacattgcctagatagcttcgcgttaaattcgggagaataatttttccatctttactgtatttttcgaatagctctgataggagaaaaataaagtttttatactgttcgtcattttctttcggagcataagacgctgatagatttcttcccaaaaacccttcataatcaaaaagtaaatcattttgatattctttaaactcatactttccatctttaaaaaagctgttaaatacttctggagtttcatctattccaccgctaaagcctttaaagtttgggcaggttttctggcaaatttctgcattctctttaataagtggactagttaaatctctgctattccaaacaagtgcaacatttgctttttgttttaaaattcgttggcattcgattttgaaagcttctttatcaaaccaatgaaatgcttgggcaacagttactaaatctacactattttcttttaaagtggtattttcagcagttgcttttatggattgaaaacgagaatatagttttaacgattgctcagccatcttcctcatatcatcatttggctcaactccaataacatgtaaaccactttcaagcagctggcggctaaatatccccgtacctgaaccaatatcagccacaatccgattccctttcacttggttagctggaagcaagtaatcaatatattcattaggataactagggcgatattttgcatacatatcggccctgtcagtaaaattttctgttgttttcacagcactaccttctttcttccgatattatgtacagaaatagaaattaaatatgaattccggcattagtctttaagtctaccacttaagagtccagctaaatagaaggcctcagtttctttattcaaatatcctttatccgtttagtatactattttagataatatcttccaaaagtttataatggcttactcaactaaacccacataactgacgttgtttaaacaacgtcaattatgttttagactgtatgtttttatgaatttatttaataatgtatgagcaattgtatgtcgtattacgtttacataggtaagagattttcatttttgctatttaaattggccaatatatcctttttacaatttactgaaaatcatgtataacagagatacatgattattttatctcgctatttgcgggcagtaagatcccttacctcgaaattcagcaaaagtaaagaagttaggttcgggtcggaatgcccgtaaaagtccgattcgtgagggttgatgaaagtttcactttataaatattcagaagtagagggagaaaagttgtaatggtaagaaaaacgttcaagatgcgcgtgtctaaaaatagaacgatttcgattaatggatcgattcttgatgtggatgttacacatgatgaatttttacaagagtttgttgagtgggttgattctaaaggttggtcgtttatgggaataacagatgagattacgcccgaggaagctagtcaaaagttaatagattcgttgattgatgagaaggataagaaagagtaattccttcttatttttattgtatatttatgttctttatcgtaaaagtatgatatagtaaaaaatagtgaaatttcttccaatataatacaaatcacatatgattggtagatttattattttgttaaggagtaaatggaaaagggagagtcatatggtaaattttaagaaaattttggtttttattacagttatttgttcgttttttttgacgcccataacattgcgtgctgagacgaatattggagtaaatccagaacaagttgcaccaccacctgcggaaggaccgaatgtttttagtcagtttgcaacgacaattgatgcgaaaacaggagatgttttgtatgataaaaacgcatatcaccgagcatatcctgctagtacgacgaaggtgttaacagcgattttactcatggagcatacaaagccagaggaccaatttacattttcacaattagcattagatcaagagaagagtaattatcaaattgagtttcaacctggagagacaattaatagaaatactgcgcttatgattttaatggtgctgagtgcgaatgatgtgtcgtatgcgattgcggagcggattggcgggagtgttgagaatttcgctaatatgatgaatgagaaagcgaagcaattaggagcgaaagatagccactttgtaacaccgaatggattgcatgatccgaaccattatacgacgccgtatgatatggctatgattacgaagggtgtgcaaaagtatcctgaaattttacaagcgatgaatacgaaaagaacgacagttacgacgtctaggcagacggtgtctatttttaataaatctaatttttttgaaaatccatatagcattggcggtaagacagggtttacgaatgaagcacgtaatacacttgttttattaaatgagaaagatggaaatcgtattataagcgtagtaatggcttctcaaagacctgaaatttatgaagatttgaagcagatggcggaatattctttcggtcaatttacgaagcaaatggtgcttgataaacataattggcatcaaaaaacaacatatttaaataaagatgttaattctgagttggaacaaagtgcggagcttatgcttaagaaagatgaagggaaaaatgtgaaaactattttccgggcggcttcattagataaagaatctttatatcataaaggaatacatcgtggtgaggtagttggtgcagttgatattacgaaaaataatcaaacaattgcgacggtaaatgttctttcaacagaagatgtcacttttacgatgcctaaaaaagatacaactatgcctgaagtaaaagactcaaatgtgaaagtaataagtgttgggataggtgcgattatattatttggagcaattttatatgtagtgttgcgccgaaatacaaaaggaatgaaatcagaaggtaaataaattactaataaaaagactgtgtaaaattttggcacagtcttttttctatattttaaataactaataattgtaaattttcttattgcaataacttaaagttcgttatatcatttacttgtgttcttgttaaagaacgtaagcggatattgcatacttcaaataatataaaacaacggagagggagagagacgatgaaattaatatggaagataattagcaacgcgatctcatttgttttatttgcattgatggtttttttagcttttgtagttatttcttcaaaagcaagcggtggtgatccgacagtgatgggatatcaatttaagagcgttctttcaggatcaatggagccgacgtttttaacaggatcaatcattgcaatagaaccaaacaaagatggttctaaatatcaaaaaggtgatgttattacctttaaagagaaagatcaaaaaattatcactcaccgtattatcggtgtgaaagatacaaatggaaaagtaatgtatgaaacaaaaggggataacaacaacggaccagatttagagccagtacttgcagaaaatgtagttggaaagtatgcagatattacagttccgtatgttggttatttactgaattatgcgaattcaaaagcgggagcagcattacttcttattattccaggagtctttttacttgggtattccgcgatttctatttttggtgctattcgtagcattgacggagaaaagaaagataaaaaagtagaacaatccgtctagttcgtttggttatactttccgtttaggaagttaacaaatatatattaaggggatatggacatgactttaaagaaaaaattaggaatgggtattacatcagcagtattaggagcagctttagttggtggaggaacatttgcatttttcagtgataaagaagtgtcaaataatacatttgcggctggaacactggatttagcattaaatccatcaacagttgttaacgtatcgaatttaaaacctggggatacaattgaaaaagaatttaaactagaaaataaaggctctttaaatattaaaaaggttctactgaaaacagattataatgtagaagatgtaaagaaagacaataaagatgattttggtaaacatattaaagtaacattcttaaaaaatgtagataagcatgagacaattgtgaaacaaactactttagataaattaaaaggtgacacacttacagctgtagataatgatttatcggcttggttctgggatgaaaaaggtatttcagcaggtaaatctgataaattcaaagtgaaatttgagtttgttgataatggaaaagatcaaaatcaattccaaggcgacaagttacaattaaattggacgtttgatgcacaacaaacagcaggtgaagaaagataataagaaaaagggctatcacatggatagccctttttctatttttctagtatttgtctatcaattttaatagttctttactataatatagataatgttctgtataaagaacgtaatgttcgatgggagagattaagatgctgaaaagaccgcgtaattttaaaaagatgcttatattgccgtgtatgtgttctattacgttttatttaggatctcaaattatgacgcatacagaagcggcgttcattcatgaaacgaaagtagaagcgacgctttctacagcaattatatttccgaaaacagttaatacgttaaaagagcaatctgagaaacataaacagtttattgagcgtgagtatggaacgatgaagggaaaatcgaaagcaacttctattgaagaaataaaacaggcgatttctgtatggcaacaagggcgtgagaaaattgttgctgagaaggaagccctgcaaaatgtatatactgaaatagaagctccttacaatcaaatacaagaagaattaaaggtaaataaagatgagtcgatgcagcaagtgtccatatatgtaaatgaaggcttccgcagtatcaaagagaagcgtgactatattgagaaagaaattagcttgaaagctattgatgagcaaattcaggctcttcagcaacaattaaacgttgcaattgaagcggaaggacaaaagaaagccgaagaacagaagaaagtagaagaacagaagaaagccgaagaacagaagaaagtagaagaacagaagaaagcagaagaacagaagaaagtagaagaacagaagaaagcagaagaacagaagaaagcagaagaacagaaaaagctagaagagcaaaagaaagcggagtaactgctttagtgaaacagccggaaaacaagaatgtggtgtaagagagagtgaacgaataagcaagactagtaatatttatacgagtgtgagggaacgttagccctcacctctttgtttttcttttttcttatagtattaaatgatttgagtgtgaaaaaagttataaattatcattgtttttttctgaaaagtctaaatgatattgagaaataaaaataactgaaaatattaataaatatgtgttgtgtttatatagggttgttcgttataatgaacataaggtttttaaaaaagaacacatattagctaagctaatatagttttctttacatctcttattgaaaaataagtgataaaaatataaaaaaaagctagggggaattgattgtgagtctgaaaaagaaattaggtatgggagttgcatcagcagcattggggttagctttaattggtggaggaacatttgcattctttagcgataaagaagtatcaaacaatacatttgcagctgggacgttagaccttacattaaaccctaagacgcttgtagatattaaagatttaaaaccaggggattctgttaagaaagagttcttattacaaaacagcggttcgttaactattaaagacgttaaattagcaacaaagtatactgttaaagatgcaaaaggtgataatgctggtgaagactttggtaagcacgttaaagtaaaattcctttggaactgggataaacaaagtgagcctgtatacgaaacaactttagcagacttacaaaaagttgatccagatcttttagctaaagatatctttgctcctgagtggggagaaaagggtggattagcagctggtacagaggattatctatgggtacaatttgaatttgtagatgatggaaaagaccaaaatatcttccaaggtgatacattgaatttagaatggacattcaatgctaaccaagaagctggggaagaaaaataataaaaaaagcgggtattcccgcttttttttataaagaaaaagaagtgctggttgtaagcacttctttctattattatttttgattttgcttccactttgtaaattcaagaaattcacgaaattgttctttggagacaccagagttcattgcatctttaacgagttgtgtccattcggagtctaggttagtttcctttgttgtttcatcatgaagtaaagtatcaactggaatttgtagaactgctgcgatcttttcaagaaactgaatggaagggtttttttgtaaatttcgttctatagaactaatgtaagatttagcaacgccagctttttcggcaagttcagttaatgaaatccctttttgtaaacgaaggcgttttatacgttctccaatcatatttgcgcacctttctatcaatatgtagttgtcttatgatgttattattataacataaacttcgttaaaaagaacaaacctattgagcctgactggatggcttcatacgttggaaaaattgctcgatgtcttgcatggcgataccggcatctagagcttcaagtattaaatcaatccattcttgatccagtgcgtctgtcttatctttgtacaaatgtaattcctccctaattatcggtcataattgctgctacagaatacatgataatgaaatccgattttgtgttttatatagtgaattatcaaatattgtgtagatgaaacaaagataaaatccccattaaactccctctatggaaattataaattgttcgataaaaactttcaatattttcagaaaacattgttgaattgtgatatattcgtatgctaactatgaaatttttacaaatatattaaaaacattacataatatgactaaatattgaaaaaatattgaatttttaataaaatttaatttgtaatacatattatttattaggggaggaaataagggatgaacaagaaaccgttcaaagttttgtcatcaatcgcattgacagctgtattaggcctttcattcggagctggcactcaatctgcatatgctgaaacgcctgtgaataaaacagctacgagcccagtggatgatcatttaattccggaagaacgtttagcagatgcattaaaaaaacgtggggtaattgattcgaaggcttcagagacagaaacaaagaaagcagtcgaaaagtatgtagagaacaaaaagggtgaaaatcctgggaaagaagcagcgaatggggaccaacttacgaaagatgcatccgactttttaaagaaagtgaaagatgcgaaagcagacacgaaagaaaaattaaatcaaccagcaacaggcacacctgcagcgacaggcccagttaaaggcggtctaaatggtaaagtaccaacttctccagcgaaacaaaaagactataacggtgaagttcgtaaagacaaagtactcgttttacttgtagagtacgctgactttaaacataataatatcgacaaagagcctggatatatgtattctaacgattttaataaagaacattatgaaaaaatgttattcggcaacgagccattcacattagatgatggaagtaaaattgaaacgtttaaacaatattacgaagagcaatctggtggtagttatactgtagacggaacagttacaaaatggttaacagttcctggtaaagctgctgattacggtgcagatgctccgggcggaggccatgataataaaggaccaaaagggccacgtgatttagtaaaagatgcattaaaagcagctgtagatagtggtattgatttatcagagttcgaccaatttgatcaatacgatgtaaatggtgatgggaataaaaatcaaccagacggtttaatcgatcacttaatgattattcatgcgggtgttggacaagaagcaggcggtggtaaattaggcgatgatgcaatttggtcgcaccgttggacagttggaccaaagccattcccaattgaaggtacacaagcgaaagtaccatattggggtggaaagatggcagcattcgactacacaattgaaccagaagatggagcagttggtgtattcgcacatgaatatggtcacgatttaggtcttccagatgagtacgatacacaatatagtggtcaaggtgagccgattgaagcttggtctattatgagtggcggaagctgggctggtaaaatcgctggaacgacgccaacgagtttctcaccacaaaataaagagtttttccaaaaaacaatcggtggtaactgggcaaatatcgtagaagtagattacgagaaattaaataaaggtatcggtctagcgacatatttggatcaaagtgttacgaaatcagcaagaccaggcatgatccgtgttaacttaccggataaagatgttaaaacaattgagccagcatttggtaaacaatattattacagcacaaaaggtgacgatcttcatacgaagatggaaacaccgttgttcgatttaacgaatgcaacgagtgcaaaatttgatttcaagtcattatatgagattgaagcaggttatgatttccttgaagtacacgctgtaacagaagatggtaaacaaacgttaattgaaagacttggtgagaaagcaaatagtggaaatgcagattcgacaaatggaaaatggattgacaaatcatatgatttaagtcaattcaaaggcaagaaagtaaaattaacatttgattacattactgatggtggtttagcattaaatggattcgctcttgataatgcttcattaacagtagatggtaaagtagtattctctgatgacgcagaaggtacaccacaattaaaattagatggtttcgttgtatctaacggaacagagaagaaaaaacataactactatgttgagtggagaaactatgctggggcagataacgcgttgaaatttgctcgcggtccagtatttaacactggtatggttgtatggtatgcagattcagcttatacagataactgggttggtgtacatccaggacacggtttccttggtgtagttgattctcatccagaagcaattgttggtactttaaatggtaaaccaacagttaagagtagtacacgattccaaatcgctgatgcagcgttttcatttgacaaaacgccagcttggaaagtcgtatctccaacgcgtggaacatttacgtatgatggcttagcaggcgtaccgaagtttgatgattctaaaacgtatattaatcaacagattccagatgcaggacgtattttaccgaagcttggtttgaaatttgaagtagtaggacaagctgatgataattctgcaggtgctgttcgtttatatcgttaatactgtaaaactaccgagagattttctttcggtagtttttttgtgagcaatgaattttatatagctgaaaaagtcatatataatgtaaccttaagaatagaaatttgttatatatgaagtttatataaataatgaaagaattggataaaaatagtgggagaaggtgagtgaatgagtatttcctctattgtaagtaggcaaaaggaatattttttaaaagggcatacgagaagcatcgaaatgagaaagaataatttgaagaagctttatgaaggcattcagcgttttgaagaagaaatatttcaggcattgaaattagatttaaataagtcagttcacgagtcgtttacaacggaagttggatatgtattaaaagagatttcctttcaattgaaacatatgtcatcgtggagtaaaccgaaacgagttcgaacagcacttactcattttggatcaaaaggaaaagtagtgccagaaccgtatggtgtgacgcttattattgcaccgtggaactatccttttcaattagcaattgcaccacttgtaggagcactggcagctggaaatacaatcgttttaaagccgtcagagttaacgccaagcgtttcaaaagtgcttaagagaatgttagatgaattattcccggaagagcttgtagcggtagtagaaggtggcgttgaagagagtacatctttgctgaaggaaccgtttgattatattttctttactggtagtgttggcgttggaaaagttgtaatggaagcagcagcgaaacagttgacgccgctcactttagaacttggcgggaaaagtccttgtattgtacataaagatgcaaagatagagatgacagcaagaagaattgtttggggaaagtttttaaatgcagggcagacgtgtgtagcgcctgattatatgtacgtgcattcttccgtgaaagaaaagctaattgaggcactgcgacatgaaattacagagcagtatagtaaagaacctttacaaaatgaaaattacgtgcgtattgtaagtgagcgtcattttgaacgattatgtggattcttacaagatggtcaagtcgtaattggtggaaactatgagaaagatactttacatattgaaccgacagtactagcggatattacatggcaagatgctgttatggaagatgaaatttttggtccgattttaccaatcatagagtacgacaatatagaaaatgtaattggcacaatccagcaacatccgaagccgttagcgttatatgtattttctgaagataaagaagtacaaaagaaagtgacgagtaatatttcatatggtggaggctgtattaatgatgttgtctatcaccttgctacgccatatttaccttttgggggtgttggaagtagtggattagggggttatcatgggaaagaaagttttcggactttttcacattataaaagcattttagcccaatctacagcattcgacatgaaaattcgttactcttctacaaaaagtgctttaaaattcatacgaaagttgttaaaatgatgatggtgtttatcagtaggcgtagccgtatgataatagccccttcgcaatggaaggggtttttctgttcgacgttatgtatcaggcgaaaatgaatcaaacatactacataaagaatagaaacgaacgcttgctaaataaccatttttgtttggatcgaaacaaaaaatagtctatagaacataaatatttattcatgaatataaaaatttaaaatttaaggtagataggacgggaaaatgaaaaagattattaaagttgaagcagttgaaaaacattttggaaatcaagtgattatcccacctctttctttagatattaaagagggagagtttttaacaattttagggccgagtggctgcgggaaaacgacgttacttcgtatgatcgcaggatttgaaactccaactaaagggaatcttttattagatgatgaaagaattaacgatttgccgccatataagcgtcatatgaacctagtgttccaacattacgcactattcccacatatgacagtagagaagaatatttgttttggtatgaaaatgcagaaagtatcagcagcagagcagaaagagcgtgctgaagaggcaatgcgtttaacgcagttacttgagttccgtaatcgtaaacctgcgaagctttctggtggacaacagcagcgtgttgcaattgcaagagcgattgtaaataatccgcgtgtattactattagatgagccacttggagcgcttgactttaagttacgaaaagacttgcaacgtgaattgaaaaacttacaacgtaatttaggaattacgttcatatacgtaacgcacgatcaagaagaagcaatgagcatgagcgatcgtattgtagttatgaataaaggacatatcgaacaaatcggaacaccgaaagaaatttacaataagccgaaaacattgttcgttgcgacattcatcggtgaaaataatattgtgaaaaacggggaaggctatgtagcaattcgccctgaaaatgtaaaagtacgttcggttgaagagtcaattttaaaagaataccatcttggacatattgaagatatcgagtttgtcggaaatatggagaagctttatgtacgtgatgagaaaacatcagaattactaatggcatatcaaactgctgaagaggcagcacagtggagcattggagataatgtatatgtaggctgggagcaagaggacgaggtgaccttaaattgaaaaaagggaaattactcgcactacctacagtcgcgtggctgttaattttcttcctaatcccgctcgtattcgtattaggattcgccttcatgcagcgcggagcttacgggacagtagaaatgcaatttacgctggagaatatatcccgtgtgtttgatccattatacttaggaacgttatgggaaactgttaaaattgcagttattacaacagtaatatgtttattaattggttatccgtttgcgtatacaattacaattgttgaccgcaaataccgctctattcttttattattggcaacgatcccgttttggattaactttcttgttcgttcatacgcatggattgttattttacgttcacaaggtcttgtgaatacgttgttattaaagcttggcattattagtgaaccgttaaatttattatataatactccttctgtaatactcggaatggtctattctttattaccatttatgattttaccagtgtatgcagcaattgagcagctggataagcgtaagctagaagctgcttatgatttaggagcaacaccaataaaggcattttggaatataacagtgccgatgacgatgtcaggaattgcgactggttctattttagtattcgtttcttctatcggaatgtttgttgtatcagacgtgatgggcggatcgaaagtagcattaatcggaaacgttattcaaaatcaattcttaggtgcacgtgactggccgtttggatctgcgttatcgattatcgttgttctattctctgttctgttaatttacttatattatcgtgcaacgaaagtatataaatataatgagaacggaggggaataggcaaagatgaagaagtttttagtttcttattcttggttaattttgttattcttgtattttccaatgatggttttaatggtctattctttcaacgactctcgcattaatgcggagtgggaaggttttacattccattggtatacagatttatttcaaaaacaagatgttattgatgcatttgtaaatagtattacgattgcagttataacaacgattgtgacaacggtacttggtgtattctttgcaatcgctttacatcgttataaatatcgttttgaaggggctattaatggccttgtatatttaccaattttaattcctgatattttaatgggattatctttactaattcttttcagccagttaggaatggaacttggacaaacaacgattattattgcacatattacatttagtatttcgtttgttgttgttattttagctgcgcgtctttcaagtatgggacgtgacttagaagaagctgcaaatgatttaggagcaacgccttggcaaacgtttcgttatgtaacgttcccagcaattgcaccgggagttatttcggcagcattattaacattcacattatcaattgatgattttgtaattagtttcttcgtatcaggaccaggatcaacaacattgccactatacatttacagtatggttaagcgcggagtatcaccagaaatcaatgctctttctacaattttaattgttgctatcgtaggattaatggttctatctgaaatcttccggaataaaggtgcagatggtgaagaaaactctggaggacaccttcctttataatacgaacgatatagaaagtacaagggggtaataaaccgatgaaattaatgaaaagaatagctggcgcagcaattagttttagccttgttgctggtgtgcttgctggttgtggtgaaaagaaagaagaattaaatatttatagctgggctgacaattttgatgagcaagtgctaaaagattttgaaaagaaatataatgtgaaaattaactatgacaagtacgcaagtaatgaagaaatgcttgcgaaattacaagctggtggcgcaaagtatgacttaatccagccgtcggattacatggttaaaacaatggcgaaaatggacttattagcgccgttagataaaaagaatatcccgaatatcgaaaatatggtttctaatttcaaaacacctgcgtttgatccagagaataaatattctttagtgtacacttggggtgtaacagggattgcatacaataaaaagtatgtgaaagaagcacctacaagctgggcggacttatggaatgagaaatataaaggacatgtaacgttattgaacgattctcgtgaagtattaggagtgggtcttaagaagcacgggttctcaaacagtacgaaagacgatgcacaattaaagacagcagcagatgatttaaagaagctgcttccaaacttattagcatttgatacagataacattaaacaaaaattcattacagaagatgcttggatcggaacagtttggtctggagatgcagcatttatcgcaaaagataataaagatgtagaatatgttgtaccgaaagaaggcggcacaatttgggctgatacgttagcaattccaaaaggtgcaaaacataaagagcttgctgagaaatttatgaactacttactagatgaaaaagtaagtgtgaaaaactacgagtcaattggttacagtaatccaaatgaaaaagctcatcctcttcatagtaaagaataccgtgataatcacatgattttcttaacgaaagaagagttagatcgtacagaatggcttgttgatgtagacgataagttaaaagactatgatcgttactggacagagctaaaaacaaaaggtaaataagtaaggaaatgcggtttctaaagtagaaatcgcattttttcatagtaggaggaaatcgtttgaagaagaagttacatcagtatgaggtaatgtgtatcggtttgttatttgctgtatttggtattgttgcttggcgcgtacatgcaggtggcgttacagtgatggatacatatgtccgtggattagtaagagggctacaaacggaaagttctcttacatttttctcgtactttacaaaattgggatcagcaattgggatagtcgctacgctcgttataagtttgcttgttttttggaagaagcgttattatgctgcgatgattgtatatccaatgggaattttaataacacatcttgtgaataaagggataaaagagagtgtaaagagagaacgtccgtcattaaatgaagcgctagatgcacttggatatagttttcctagtggacatgcaatgctatcgattatgacatttggatttcttacttatatcattgctgctaatttgaaaagtgtagctgggaaatgtgtcacaacaattttgatgggtatagtaattttatcgattggattaagtagagtcattttaaatgtacattatccaactgatattttagctggttactgcgtaggtggtattttgttaattatcgcgatttactaccatcgtttacttactgagagattagggcttaataaagagagatagaaaaacgtctggaaaaactattattatagtttttccagacgttttttgtttatatcaagatgtgatacagtataagtgacaattgaattatttaaagtaggtgaaaatgtgtgaagacaaatgtacataaagttgataagtgggggaagttaggagcctttttgtatcagtttcgttataccgtaattgtaacgttactgttgctcgcaatcgcacttgggatttttgctccaaagctaccgggagtattaggtggtgacggtttccaaacggaaggcgactatcaaaaaacgaaagaaattttagataaagattttaagaagtctcaagatacgctgctgctcatttttgagaaaaataaagatgcttcgcatgaggaatttaaaaagcgaataaatgaaattgtaaagaatgttcaagagaaagagaactatgaatctttccatcacccaatccaaaataaagaaatgctacaagatgacatcggttatgcgacaattttattttccgggaaaacaaataaagaaagaatggaaaagacattacaatttgctgatgagattgagaaagaaagtaatgtagcattaaaagtaacacctacaggatttccgaaaattaataaagagattaatgaaagaacgcaaaatgatttaaaagtagcagaaatgattggattaccaattgcgtttcttgtattactattttcgtttggtagtcttttggcatcaattttaccgattttgaatggggcgcttagtgttattagtacgatggggatattgtatttcatcggtgttgataaagaactatctattttcgtgttaaatgttgcaccgatgattggacttgcattatctattgattttgcgctattatttgtgaaccgttttcgagaggaagttgctaaacgaacggtaaaagaagcgataacaattacatatcaaacggcaggacgtgcgattgtattttcaggattatgcgtatttgttggattatctggtttgtttttctttaagatagattatattcaatctgtcgcgattagcggaatgattgttgtcattatgagcattttattctcactcacacttcttccagcactattatcgttaatcggtaaaagaatattaaaaaagaatcaagtagcacatacgccggcaaaagcatggcgtaaatttgcacaatttgtgatgaaacatccaattgcaatgattattgttgttacaacatttattgttatttgcttattaccgttacgtacagctaatttgcagttccctggtattgaagctttacctgaaaagagtgatacaaggattgcatatgaaaagtatgaagaagcatttaatgaaactgtcaaaacacacgctgatgttacgttagttgtagagacgaaaaaagatatgaaagaaaaagaaagtctacaaaagatagaagaagtcgttcaaaagttaaaagatgataagaaagtacatgaagtaagaagtttatacgacgggttaactggaatgaaagcagatcaagttgttggaatattgcagtcgccagaatcagcgaaactaactcctgtatttgaagcatacacgcaagggaataagacgacgatagaaatctttttgaaaacaaaaccacgtacagagactgcaaaacagtgggtacgtgactttaaaaagaactataaagaaacggatgttacgtattatctaggcggaatgacgacgtttcaacaagaattagaagatgaaattaaagataaagttgtaattggtatgtctgttatatttggatcgacctttgttatattattatttgcattccgatctatgctcattccaattaaggcaattgttatgaatatacttagtttaagtgcaaccattggaattgttgtttggttatttgaaggtggtcatttcggtttagaagcgagtccggttctgtttgtcttaccaatcttcatttttggcctcgtatttgggcttagtatggattatgaagtatttcttatttcacgtattcatgagctctatgaagaaacaggagataacgatcaagcaacgttagaagggctcgtttcaacaagtagaattattacatcagctgctttaataatgattgttgtaactggtgcattcgcatttactgatattttaccagtaaagcagatgggtcttggcgttgcattagcaatatttcttgatgcaacaattattcgtcttatgctcgtaccaagcttaatgaagttatttggagactggaactggtggttaccatttcgaaaaaaacgagaaaaagcatcgtaaaaaatgctcatcaatatgatgaacattttttatgaatagcaaagcctacattttgcaaatagtatgtgataagaacattacataataagtaggtgaaggcaatgtttcgttattttaagtttaagttaaatgatacagtacagtttgccgagaacgatgggcatatgtatcgcattgtcggttatcggttagaaaaaggattttatccaaaagatgaatggactcatatcatttatgaactacttagagaatttgacgggtatacgatggatgcagaagaggaagaacttgtaaaggtcgttcaagtagaggatgagtattacaaaatacaagaagtatcaggttatcgctatccagtaaaaatgaaacaaaaacaacaagtgatgaaaatagaaaagatggacgatttattagatgcttacaatgattataaaaggttggcggatttctttaaagatttatcgtatgaacaaaaagctgaagaagtattattagaaatgaaaagacttagagcttgaggggcagtctattataagactgtcctctatttttgacagtgcatcaaagtgtgttttccgttacaatgagagaatcaatagaaataaggtgataaacagtatggaaacaaagaaaaagggcgaatggtgtgaaattatcgttccagctaaatggaatggtataagtattgaatcggtattaaaagtagaatgggaaataccgaaaaagctattacatcagcttcgtatggaaaaaggtgttacggttaacggggaacaaagaagatggaatgagcttttaaaagagaacgataagttacaagtccatatgtttgcggaggaagagtacggtgtagatccagaatatggtgaattacatgtagtatacgaagatgatcacgtacttatcgtaaataaaccagagcaaatggacacacaccctgctgaaagaggtggaaccgggacgcttgcaaatcttgttgcttttcattttcaaatgcaaggtttagagacgaaggtgcgtcatattcatcgtttagataaagatacgacaggtggtgtcgtgtttgctaagcatagaattgctggtgcaattatggatcgtctattaatggaaagaaaaattaaaagaacgtacgcagcgctcgttgaagggaaagtaaagaagaaacaaggaaagattgatgctgctatcggaagggatcgccatcatgctacaaggcgtcgtatttctccaaaaggtgaccaagctatcacatattataaagtagaaaagtattttaagaagcaaaacacgactttcgtaacgttacaattagaaacgggtagaacacatcaaattcgtgttcatatgagtcataatggtaatccactagttggggatgtattatatggtggacaaacaaaatatatgtccagtcaagcattgcatgcgatgaagataaatttcttgcatccaattacgaaagaagcaattgaagttgatgtgccgtttcctacaaagttaaataaaaaaataaaagaatttcaaaaagaaaatgcgtaaagtataagttttaacttgaaaaaagtagatttttgcagggatttctctaaaagaagcgaagccgttaagagaaaagagaggtgagaatcacttgatcaaatataagtatgtacttggaatatttttcgcttgtcttttacttactctatttctctatccctatttaccaaatcgtatggcagtacattggaatgtaaatggtgagccaaacgagtttatgagtaaacaagttgttgtagcatttattccctgttttattattttttcatatggatttttgtatattatttcacataatatatttaagtttaatgaaagagggcatggtattataggcggctttataaagaaaattacgttatttatgttgtttattcatatgcttatcctctttattaattttaggaaggtgatatcctttcaaacaggattaacgattgggattagtatgtttctttttatgctgagtaaagaatttaagaacataaaaggcaaagaaaaagaaaaagaaaaagacccaattaaattacaaaaaattcgtttagtgagtagacgaatttttcaagtgatggcatggggcatattgttttcattgtttttgaacttagagtggggattttatgtattgcttagtataataagctgtggatctatgttgtttatgttatatattttctattcatacataatagaaagctatgaaacttaaaaaagagtcttctcattatgagaagactcttttaatctatttacttcgtaataaattgttgtgtccagtagttgccgctttctacataaccaacaccgatgtgagtgaagccgttatttaaaatgtttgcacggtgtccagcgctgttcatccaagcttgtactacttcttcaggtgtacgttggccttgagcgatgttttcacctgcagatgtataagaaataccaaatttcttcatcatatcaaacggagatccgtatgtagggctgttatgatcaaagtagttgtttttttgcatatcttcagacttaatacgtgctactttgcttaattcagtatcgatttttagtgctggtaagccttgttttgcacgctcagcgtttgttaattcaacaacacgttgttcgaactcacttaaagattttgcttcttcagcaggcttttgctcagctggtttttgttcagcaggtttttgagtattgttgttttcagcaggtttttgagcttctggtttttgaacttcttcagcaggcttttgctcggctggtttttgttcaactggcttttgagtttctggcttagctgttggttgctcagttacaacattttcagtaggttgttgaccaggaatgaagcagtttggttggaagtttccttgttgccattgtgctaatgattcaactcccatagattgtaagaatgcttgtaattcttgttggttcatttgtttcatcatcacttttgaatgctgaatattttgaacctttacgttagatggttgtactgttgcagcttgtgcatctagagaagatactcctaaagtaagagctgttgcagcagctacagataataaaacacgctttttcatgatgtgtgtccccctatataaagttttaatttgttttcacacgatttgtttttgacagcctgtctgactgacaaattcatcgtagcatacaatttgcgagaaaaaagatggaaaaaaattcatagactttaaaattacctaatttatcctaagagaagaagggagcaaaaataagagaaatatagagtataaaaggaatttatagtgtttttatacttggttttaagagggggtttttggataaagttacctaaatagaaaatgaagaatcctattgtatcaatggtttgaacgattttttgaggaatataatggattgatttttacaaaactgtaatgtttctgttgttcttttttataataaagtaacatatttttaatgttgtagcagacaaaaaagcggctatctctttacatagacgaaggagatagccgttttcctattattacgtatgttacgagttattacgagttagtttcaattgcttctaataataaatccacaatgtgaattcctctcattttatgagaaagcccttctcgctcaatgcccaatttcatttgtaataaacaacctggatttgcagtaacaatggttgctgcttctgtttcatgcacacggtccattttgtaatctagaaattccattgataactctgaatgaacaatattgtaaataccagcagagccacagcaacgatcggcatctttcatttctcgatatgttgcaccttggatagcctctagtaacatacgaggttcagaagatgtgcgcataacattgcgtaaatgacaagagtcttgatacgtaataacttgcggcgtgagtcgtaagtcagttcgcttatggaagtctagttctactagtatagcagtaatatctttaatcttagaaacaaactgcttagcacgttcagcccaatccggatcatcctttaaaagataatcatagtctacaagataagccccgcaaccacctgcattggtaataatatagtcgatgtttaaatcttcgaatgcttttatatttcgctttgctaattcttttgctccactcttttcaccagcatgtccatgtaatgcaccgcagcaactttgtgtttttggaataacgatatcacaaccagctagttgaagaagtttcatcgttgcgttatttgtttctaaaaacatcgtatccattaagcagcctgtgaagaatgcaacttgttttttctttgtactttctgcaggtaaaaatgaaggacgatctttcatcgctttcattttagggacttttggtaaaacgagatccatcgttgcaagtgtttcagggaataacttcataatccctgttttatgtgttagcgtttgtaaaccagaacgttgataaaatccgattagtccagttaatgttctcattcgattttgatgggggaataatccttcaaaaacgacttttcgaacagctttcactggcaccgagaattttttattttgattaataatatcacgagcttcttctaataaatggccataatttacaccagatggacaaacaggttcacaagcacggcaaccaagacaaacgtttaatgtatcttcaacatcttcatctggttcgattaaaccatcaacgacagctttcattaatgcgatacgtccgcgcggtgaatgtgactctttatatccggattgaatgtaggtaggacaagtaggtaaacaaaaaccgcatcgcatacagtttagtaattcatcttcacttaatcgttctttaaattctttttgaatattttctttattcaatgtcgtcatcgctcaaccaccactctttttcgagtgtctttcgcgaacatttttccaggattcataatgttatttggatcgaaagcttgctttattccttgcatagctgcaataccttccttacctaatttcatttctaaatatggagctttcatcgcaccaacaccatgttcaccagtaattgtgccaccaagttcaattgctttcgcaaatatttcagcaaaagcttgttcagctcggtgcatttcttctgcattacgaacgtctgtcatacaagttggatgtaagttaccatcaccagcgtgcccaaacgtacaaataggaatattatatttttttgcaatggtattaatagcttcaaccattggagctatttgtgaacgtggtacagttgcatcttctaatattgtagtaggttttaatcttgcaagcgctgatagggcactacgacgagcggtacgaagcgcatctgcttctgtttcatcttttgcaacacgaacatcaaccgcattcatagagtgacaaacgttagccattttttcaatatctcgattgactacttcgggcggaccgtcttgttcgattaataaaattgcttttacatctgtaggtaaaccgatttgtgcaaactcttctactacttcaattgtcggttggtctaaaaactccagtgttgctggaatgattttatttgcaataatagaagaaacagcacgtgcagcttcattaatatcttcatataatgcaagcattgttttctttgtttcaggcataggaacaagttttaatatggcttctgttacgacgccgagtgttccttcagaaccgataaataaacgagttaaatcgtaaccagctacatcttttgctaatttaccaccagtgcgaataatatcaccatttggtaagacaagttcaagccccattacataatcacgtgttacgccatatttcaaaccgcgtaatccacctgagttttcattaatattaccgccgattgtagaaattttcatcgagcttggatctggtggataaaataaacctttttcttctaccgctttaataatatcaagtgtaatgacaccagcttgtacagtaattgttaagttttcttcatcaatttctaaaatattgttcatatggcggaaaataaggacgataccgccttcaagtggacatgttcctgcgcaaagatttgttccagacccgcgcacatacacagggattttgtaagtgttacatacttttaacacttcagctacttcatttgtattacgaggagcaatgactgcatcaggcattgcttggaagtttggagtggcatcataactataagttaaacgccccatattggatgtatctacattatcttcgccaacaatagatacgaatgaatgaataatttgtttttctaacattggaaatccccctcaaactgttaacgtgtttagttataataaacaacgtggtaacagtgctttcattataatgataaaaaagtcgagggattctttctatgtataatcatctaaagattaatctgttttatcgttcttttttgtatgattatctaataggaggagtgcgaagtataaaacgtttaagtctttgaattgttttggatcaagtcctgtatgttcttcaatcttttttagcctataatgtaaggtgttaatgtgtatatgtaattgtttagctgtctgtttataagattggttataatcgataaataagcgtaaagtgtgcataagctcaggagatgatagtaagctttcgatggtacgctctagaaattgttcacgcgtttcggcagaaatatcttgtaaacacatttctaaacgtaaatcttcattaaatacaatttttttcgtttccaatgatacagaaagagcacgtaatgcttgttcgtaacatatgttcatattgtttggggtaactgtttgcccaatcccgatatataaaggaatagaaaataaagcttcgcagtcttgttttaaccgttttaaaaactgataagtttgttctttggagctcatcgctgtaaataaaataaaacgatcatttccccagcgaacaaatagatgctcttttgttaaaatatttcgtacatgttgccatattttacgctggagcattgtgtcatttttgccaatagaaaacaaaacaagttgttttttcttatataaatcaatgccaagtgttttggcacgatcaagaaaactcggggaccactctgtattttgaagccaatcaaagacaaaagcttcataagaacggtgctcaagttctaattgctctaaaaagtagttttcatgaattaataattcggtcatcttacgcaatatttctccgtagcgtgaaatgttttcaggttctccggtaatcccaatgacaccgattacttcatcatgaaataatagaggaagattcatcccagcctttacaccttgcaatcgcctttcatcttcttttgtaatgatgacggttttcttttgtttagcgcagcggagtgcaccttcatgaaattggccaattctttctgtatctgtacttgcgataataacgccttctatattaatgataattatattttctgtaattagtctgcgtacttctcgtacaattttattcgctaaatcaggaaatagcataattgacacacctcaaattctatttgttgtacattatatatgtaaattgagtaagaaaggggaatttcacactttccacacatttatttgttattttacaattataacgaaatcatctgaaggtggagggaatcttttgagaaagtatgtttttcttctctgttttttatttctattagtagggtgtcaaggaagttcatatacaccaattgctaaagataaaaatgttattataactacgaatataaaagaaggcagtattagttttattgataaaaaagataaaaagttaattacgacatgggaactaaatgagccaatggctggaatcacactgcttccaaatggcgatgaaatacttgtatacggtaagcaattagaatatatgtatgtatattcactagcggaaggaaggcaagtggaaaaatataaaactggaaagggcattgtaaatgtggtcgtatcagcagataaaaaacaattatttgctgctgatcaaaatgttcaaaaggtaaggttctttacgataaatgggaaagagacaggaaatgtttcaacaggaaaagggcctataacgatggtagagtatcagaatcggttatctgtactaaacttttatgatacgaaactaacgacaattgatacgaagaaaaaagaagttgttcaatcctttatgattccgccagcatcaacaggagcgacgattagtcctgatgggaaagaaatatggattggcgggcatggtgatggaaatcaagtgaatgagaaagtattagtgtattctttacagagcggtgaaatggtacgttctttacacgctccatttatgcctgtgaacataacgaaagataataagtacgtatatgcattaagccacggttcgaatatgcttagaaaatttgatattagtacgtataaagaggtagcttccgttgaaataggctcaaatccatttgcatttttgaaaagcggagcagaaggatatgtagcaagttatgatagtgatgaagtgtgcgtcatggatatgaagagtatgaaaataaaacaaacaattaaagtcggaaaaggaccgtttcaactcatagagagggaagggaaggacaatgaataaatatagagtgctagttgtagatgatgaaagtgatatgaggcagcttgttggaatgtatttggataactttggatatgagtggggagaagctgaaaacggaaaagaggctcttaaaaaactagaaacggatcattatgatttcgttgtattagatataatgatgccagaaatggatggactttcagtttgtaaagaaattagaaaaacgtcagatgtgccgattatatttttaaccgcaaaaggtgaagagtggaatagggtgaatggcttacgtatgggagcagatgattatattgtaaaaccgtttagtcctggtgaattggttgcccgtatggaagctgtactaagaagatatacaaagcaagaacagcaagaagagattcaatttggaccaattcttatcaatgaaaaaagcagacgaattgaggcgaatggtgagtcgatttctcttactgtaaaagagtttgatttactatattttctttgtcagcatacaggacaagtatttagccgggagcaattacttgaaaaggtatggggatatgattatgccggaagtacaagaacagtagatacgcacgtgaaaacgatgcgcttgaagcttggagaaagtggaaactacattcaaactgtttggggtgtaggctataaatttgaggtgtaacatatgtttacgatggtacaaaaactttggcttacagtagtatgtgcagtatgtgtaacagtgtcctttctttatttcgtatctttatactcgtatgaaaagttatacgttgataatttaaaaacttcgttagtaatggaagggaaaagtcttgctgctcaatatgataagcgtgaaggaatatcaacttttgaagagaaagtaagatcgtttgatcaaatatctagttcagacgttattttcgtatctaatccgcgtgatttaagcgcatgtttgccttttgatgtgcatcatcattctcttataagtgaaggagataggcaaacgctattagatgggaaaactgtgacaaaaataggatatgaagaacattttgaacgtaatattatgggggttgtcattcctgtattggaaaataaaaaattagtcggaattgtctattcgtatattcctttaaaaagtataaaagatttaatctatgatatgggtcttattttagcaccgctagcaattgctatgattttaattacgatatgggttggaagaaaaattataattgcaattacgaagccactttcgcaaatggagcgggttgcaaatcatttggctacgggagatttttcggagcggattacagtttcttcagaggatgaaattggacgattaggaaaagcatttaataaaatggcaaattcattagaaacagaagatgtaaagcgtaaggaatttttagcaaatgtttcgcatgaacttagaacaccacttagttatataaaagggtatagcgaggctattttagatggtgttgcaaagggagctcagcaggaaaaagtaactcagctaattcataaagaagcaggtcgtatgcagcgtctcgttcatgacttgttagacttagcacaattagaaggtgagcactttccgttaaagaagcaacctatcgttttttcacagctgattgaagacgtattagatacgtatgagattaagtttatagaaaaggaaattcatatttcaaccaatttaaatccagaggtcattgtcatgattgatgaggatcgtatgcaacaagtgcttcataatgtgttagataatgcgatacggtatacaaatcaaaaaggaaatatcgttataactttagagcaaatcgatgattactgtgaattaaaaataaaagatacaggaattggcattgatatagagcatttggagaatcttggggaacgcttttaccgagttgataaagcgagaagtcgtcaacatggtggaacaggtttaggccttgctattgtgaaacaaattgttcatatacatggtggacagtggaaaattgaaagtgaaaaagataagggaacaacggttattattaaactgaatgtacaggatgagggggcatgttctaatttttagggcatgttctttatattgaagaaaatatttatcccgctattctccggtcagtaagaccctcacctcaaaattcagcggaagcaaagaagttaggtggaggcactgctgcccgtaaaagcccgattggtgagggctaataatcagtgggggatgaacaaaaccctcactgattaaagtttcactttatacgtaaaaatataaattaatatgtaataaatatcgaaaatttgactattttatgaacaaaacatttgtacttcttatcaattcggtctaaaatagttatgatgcaaagttcttataaatcgtttcaattgttgtttggaagatactgaggtgatttaactggagtacaaatctattaaaccgaaaaaaatttacgaagaagtatctgaagctattttaacaatgattaaaaatggtacgttaaaacctggtgacaaactactccctgtgcatcaattagctgagcagtttcaagttggcagatctgctgttcgtgaagcgctaagtgcgctaagagcgatgggcttaattgagatgaaacaaggagaaggtacatatgtgaagaacttcgattcttcttcattaacgaaatcattaaacaatagattattaatgaagaaagaagatattttgaatttattagaagtacgaaaggtgcttgaagtgggggcagttcgagtagcggcggcaaaacgtacggaagataatttacaaaatatgaaacattggttagatgaaatggcaaagagcattggagatgaaaaggctggcgaaaaagccgattttcaatttcatatgggaattgcagagtcttcgcataatagcattttgcttgaactcatgaatcatgtttcagagatgattgctgaaacgattggtgaatcaagacgcattattttatatggtgaacaaacgacatcagaacgacttatagaagagcatcaagttatatatgatgcggtgttaaaacaagatgtagaattagcgcagcaagcaatgctagatcacttaacaaatgtagaacatattgtcacaggtaaaaacgatataaattcgtaatttaatcttttaaaaatttaattttctgataaaatagagaaaggttaagtaagcgttttctttagaagagggagaggataggccatggttgagcctatttcttctctgctaagtcatctgatgaccatatgtttgttggtgaagttgtaaaaagggggagtaatagttatgaaagttactttatttgttacttgtttagtcgatatgtttgaaacaaatgtcggtaaagcaacggttgaagtgttggagcgtttaggttgtgaaattgaatttccagaagcgcaagtttgttgtggtcagcctgcttataatagcggccatgtagaagcagcaaaagaagcaatgaaacatatgattgaaactttcgaagatgcagaatatattgttacgccatctggttcttgtgcgacaatgtttcatgagtatccacatgttttcaaagatgatccaaagtgggctaaacgtgcacaaaaagttgctgataaaacttatgaatttacacagtttattgtggatgttttaaaggttactgatgttggtgcaagtttaccaggggtcgctactattcataaatcatgtcatatgacacgtatgcttggaataaaagaagcaccaggaattttattatcaaatgtaaaaggattaactgtgagagatttgccaaacgtgcaaaattgttgcgggtttgggggaacgttttcagttaagatgactccaatttctgagcaaatggtagacgaaaaagtagatagtgtaatggaaacaggtgcagattatttaatcggtgcagattgtgggtgtttgttaaacattggcggacgtattgagcgtttaggaaaagaagtaaaagtaatgcatattgctgaggtactgaatagtcgctcatgaagggggaacataagctatgtctatgaaaatcagtgagaaaaaatttaatgatcgcgttggtgatggaattcaagattcgtttatgcgcggagcagtatcttctgcacaaacgcgtttatatacgaatcgcttaaaagccgcagatgaactaggaaactgggaagagtggcgtgaactaggtgaacaaattcgtcaacatacgttagaaaatcttgattattacttaatgcagttaagtgaaaatgtatcaaaaagaggcggacacgtgtactttgcgaaaacgaaagaggaagcagcaaagtatattcaagacgttgcaaaaaagaagcaggcaaaaaagatagtaaaatcaaagtcgatggtaacagaagaaatcagtatgaaccatgcgcttgaagagattggctgtgaagtgttagagagtgacttaggagagtatatcttgcaagtagataacgatccaccttcacatattattgcacctgcacttcataaaaatagaacgcaaattcgcgatgtatttaaagaaaagctaggttatgaaaattctgatgacccgtatgaaatgacaaagtttgttcgtaaacaacttcgtgagaaatttatggatgcagaaattggtgtaactggttgtaactttgctgttgcaaatactggctctctttgtttagtaacgaatgaaggtaatgcagatcttgttatgtcaattcctaaaacacaaatagcggtaatgggtatggaacgtatggttccgacaatggaagaattagatgttttagttggtttactatgtcgtagtgcagtaggtcaaaaattaacaagttatgtaacagtagcggggccaattcaagaagaggaagttgatggacctgaagaatttcatttagttgttgttgataatggtcgctctcaaattcttggatctgaattccgttcagtattacaatgtattcgttgcgctgcttgtgttaatgtatgtcctgtatatcgtcacgttggtggacattcatatggatcgatttactcaggaccaatcggtgcggtattaacaccgcttctaggtggatatgatgattacaaagagcttccttatgcatctagtttatgcggagcatgtacagaagcttgtccagtaaaaattccattgcatgatttattattaaaacatcgtcaagtcatcgttgagcaagaaggtcgtgcaccacttgcagaaaaactggctatgaaaatgtttagtatgggtgcttcttcagctgctttatataaaatgggttcaaaaatggcaccagcggcaatgagtccatttacatctggtaatcgtgtatcaaaaggtgttggaccacttaaaaactggacggatattcgtgaattcccagctccaagtaaagaacgattccgtgattggtataaagatcataagaaaggcggggataaataatgacaggattaattcaaaaccgtgatgcctttctagataacattgcaaaagaacttgggcgcgcgcgtaaaacagaaggtgtagagcgtccagtatggaaaagtaatgtgaatatagaaacgttaaaagattattcacaagaagaattactagaagtgtttaaagagcaatgtacaaacattcatacaactgtagtagaaacgacaaacgaccgtttaggtgaagaccttcaaaaagtaatcatggaaaacggcgggggacctattttattatcagcagatgcgcgttttgatgcatatggtttaacatctttatttaaagaagaacttccaaaacgagatgttgaagtaaatgtatgggatccagagagaaaagacgaaaatatgcgtttagctgaaaaagcgaatattggtattgcatttagtgattatacattagctgaatctggtacaattgttgtacaaagtcataaaggtcaagggcgttctttacactttttaccgactgtatattttgctattattccacgtgaaacacttgtgcctcgtattacacaagcagttcaggatatgaactcacgcgtagaaaatggggagacagcggcatcttgtattaactttattacagggccaagtaactcggctgacatcgagatgaatcttgttgtcggagtacatggaccattaaaagcagtttatttcatcgtataaaagaggggaaagcaggccaggaaatggcctgctttttagtagaataaaggataatatgaagtagaagttctctcctttttttgctatgttttttgggaaaggagaggaagggatgttcacttatttatatgcactgttagcagggatggtgtttggttctttttttatgctagttgcgatgagggttccattaggtgcttctattattaccccgcgttcacattgtgattattgcaaatatgtgctaaggacaaaagaactaatccccatcatttcattttatatacaaagaggctgttgtacgaattgtaagaggaaaattccaattatgtatgtagcatttgaatgtataacaggaggtatatttcttcttacagtgtatatgattggaatagaacgagagcttattattattttatcccttttttcgctgcttcttattatttcagttacagattacttatatatgttaattcctgattgtattttaatttcgtttgcctttttactcattctcgaaagtgtttttgtacaattagttacttggacagatagtatagctggtagtggtgttatatttattttgttatattgcatgcaaaagatatatccagaagggcttggcggaggagatataaaactactttcgttacttggatttatagtaggagtgaaaggagtttttatcgttttatttttagcatcttgttttagtctttgttttttcgggattggtatcggattaaaacgtatagaagtacgaaagccaattccatttggtccttttattagtctcggggcaatatgttatgtattggccgcatattcaaattagagagggaatcgaaaatgaacgtatatatggatgatcaaagaagttgcccgttcgggtatgtgcccgcaactacagtagaatgtgctttgcaaatggttcaggattatgatgtgaatattctttctcttgattttaatatgggatggggagcgaaaaatggactggattttgtagaagctttttgtacagaggggttatatgtaaatgaaattcactttcatacgaatgatgtcatcggtatgtacaagatgaaacagagaatggataagggaaaggaagaaggagaaattactcctcaccttgttattaaatacgtgggaagctaaaaactccaaagtaaaactttggagtttttaatgtttcatatgggcttgtaaaggaataatctcttcttgttgagctgttgcgatttcagtttcttcctgttgaacttcaggggttttctttgttaagtagtggtataccataccgacaaatactgatccgccaataatgttaccaattgtaacaggaattaagttatgaatagcacctgaaaaagaaattgtctcaggatgcggtgaaactaaagataaagcaaagagtgataagtttgcaatactatgttcgtaaccagataagaagaatgtgaaaacaagtagcatcatgaccattatttttgctgtgtcacctttaacctgagaaggtaagaagcaagcaagacatacgagccagttacataaaatggctttaaagaataactgcatcgtaggtgtattcatctttccttcaacgactttactcattaagtgaccgtgatcaattgcttcaaaaattccagttgcgtaaaatagtaaggcaaagaataatgcgccggctaagttacctgcataacaagcaacccagttacgaagtgtatcagaaatcgttgtttcttttcttaaagttgcgacagtaaagtacattgtgttcccagtaaacaattcagcaccgccatatataataagtacgagagcaatcccgaaaaacatagaagcggctaaataagttgctggtgaatctgcaatgtgaaaaaagttacctaatttaaaacatagtacaataataaaaccgatataaataccagcaagtgcagcacgaatgaaatattgcattgggtttgtatctagtattttctttttgcttttagccagtttgacaacataatctagtccttgttctagcatgagtaatacgctcctttagtaaatcttctataaatactccttatatgaataaagtacatggaattgttcttactttcaataagtttgtgcaatgtttcacaaaaaggacatacatacattaagaaaacgtttacaaaaggtagtataatggaattttttctggacattgcgaggaagaaaggaaaaagaaaaagcgctgtaattacagcgctttttcgtctaaattcttttccacttttacttctacttcttttgagaagaaccaaccaccaactgcgattccgactaatacaatccagaatgtaagcttccacggagtggattctgggaatgaatgtggaattacatttaatgcaggatgtgctaatgtataaactgctagcttcacaccaacccaacctacaattaagaatgctgcagtttcaagccctggtttacgttttaagatttgtacgaaagcagttgctgcaaatcgcataatgattaatccgataagtccacctacaaagataacaacgaattgcccagtatcaagactaccaattgtacctagtcctgtttttggtaaagtcattgctagtgcaacagcagctaaaattgaatcaactgcgaaggcgatatcagcaacctcaactttaaatacagtccaccaaaagttctcttgttttttctttgcttctttttcttcagtttcttcatctgtattctttttaacatatgttttaaataagtgattaccagcgataaacataaggtagatggcaccgattgcttgcacttgccatacatcgactaagaacgaaatcataaataacgatccaaatcggaaaacgaatgcccccgctaatccgtaaaatagtgctttctttcgtttttcttctggtaaatgttttaccataattgcaagaacaagagcgttatcagccgccaaaatcccttcaagtgcaattaggatgagtaatacccaaccatactccaataataatgatacatccatgtacattctcctctcatctctataacttctaaataagtgaagaatttccccactatttagtttccccatactcctgcctattaactttgggagaatctggaaatgaatgcaaaaaagacctctgccgttaataggcaaaggtcttgctagacatatgtaataaaaatgccaacaaagccggaagaactaagttctacgtaatgacgactttgtttccaagatatattcttggacgctactcccctttggagatatgttattgtattctcattatatggataatttatacggttgtcaacctgttaaaatatcttcattcggatattttatttttcggttctttttacgagcaaatgaaaatgccaatgttaaaggacccattttcccaaaaaacatcataaaaataataatcgcttttccaattatagttaagtggggtgttaagttcatactgaggccaacagtcccaaatgctgaaaatacttcgaaagcactcatcaatagagaaactcgttcagtaatactcaaaattaaaatagcaaaaaagataaatgaaatagaaataatagtaatggttaatgatttgacaatgagagtatctttaatggattttttaaatacgacaatatcttcttgttgttgtaaaaatttaaatacgccaaaaaatatgattaaaaatgttgttaacttaatccccccacccgttgaagcactaccagcaccaataaacataagtagcatcattaatagcagggaaggttttgacaatgtagaaatatcaactgtattaaaaccggcagttcgcgttgaaattgcttggaaataagaggccattccttcttcaaatggggtaaaccctctcatagaaagggagttatggaactcgaatataaaaataaaaagggtagcaataatgttgatgattagagtagaagagagcataagttttgaatgtagtgtaaggtttttaaagtttttctttctttttatgtctacgatcactgtaaaaccaattccacctaaaatgatgagagaggaaatgacgaaattgacaataatgctatgagaatgggacattaaattatcgctccacacagaaaaaccagcattgttaaaggctgagattgaatggaaaaaactataatagatccctttggtaaccccgtattttggtacccaatcaaaagaaagaattaaagtagcgatacattcgactgtaaaagagaataaaaataatgctttggcaagacggatgacgccgcctatattcgtttgatttaatgcttgttgcagtaaaatccgattttgaagaccgatttttcttccgagcataatcgcaattaagacagcaaagctcataataccaagcccgccaacttgtataagcgttaaaatgatacattgtccaaacaaagtaaatacttttccagtgtccacaacaccaagtcctgtaaccgtacaagcagaaactgttgtaaataaagcatcgagccatgaaatagacgttgttgtagcaattggaagctttaataagcatgtacctataattgataacatgataaaagacaaagtaagaacgcggggaggactcatacgaatgttaatccgtttcatgttatatatcgttcctttctgtttgctcttactagtatgtgaaaaagtccgattatgtatgtgaaaaatagaaagaggcagagaatatctgcctctaagccatatgttatattattatccacgtaattgttgttgagctaaagaaacaagacgttttgttacttcaccgccaactgatccgttagaacgagatgctgtattagaccctaagcttacgccgaattcttgtgcaatttcatatttaaattgatcaagtgcttgttcagcacctggaactagtaatttgtttgtttttgccatgatgatacacatccttatgagtaatccagtccagataagtacttatctgaattggtactgttattttatgtggaaccggcgtgctcatacgcggaagtaatcggtgtgattagaagttattggatagaaaaaagagtagcaaatttgctactctttttttagtattgtcgctgtaccttccacgacaatatcatccgattgattatatatatttgtttgcaacgtaatgatttttttatcgtcacgcttcttaataacctctgccacaacgcgaagtgtatcaccgattttgacaggggcacggaatgaaacattttgggataaataaatcgtatttttgcctgggagtttcgttccaaggatggtagaaataaaactcgaaacgagcataccatgggcaatacgttctttaaacattgtcgttttcgcaaaagaatctaaaatgtgaataggattcacatctccagtcaattttgcaaaattgataacatcttcatctgtaattgtttttgtaagggatgcttgatcaccgacttgaatctcatcatagcgaagctccggaacagtttgtgcttcttgaaatggattcattttgtcctccttcttttccatatcgaaaaatgttagccatcttgatgtagtaggaggaagaaagagttttgtttgtgctgcggttagctcccacatttttcttacttgatggaagtaaatagattttttgagttttcctcgaacttttttgcgagttccaactgttttgacttgaactcttccaaaaaaccctctaactgtttttgagcctcttcacgttgtaattgttgttgttcaataaattgttttgttgtttcttcaaattgaccgcttgtttgtgtaagaattgacaaagaagtttttgtaggagaaacggtaagctgatgcatatgagcagaaagttctttccatttgtcttgccactcgttaatttgatcatttaaggagtttccagttaattgtttcacgtaatctgtatattggttattgaactgagcagtgagttgttgtagttctttttctagttcatctactcctgatgttaacttatgcaaagcgtcttgttgttgttttaatgtttctaaagtaagttgctctaactgtttcccagctgaagagaaaagggaaagtgattgagaccagtttttccaaaatgcatcgactaattcgtatggtttagtttccattgtttgacccccaaatgtttttttgcatattgtgaacgcagattactctgctgtaccaccaggtgaagatgaagaatccttttcatccttttctggagaagtagaaaatggaaagaatgcattggtgtataacgtgaaaaacgttcgcaacatattttgataatgttcaaaagaagtcgcacatgttgttaaatattgctctccatattcagttaaagaataaattctttttgctggccctccatcgcttgtatcccaagtagaagaaataaggttttctttttctaacttgcgtagtgttctataaacattaccttggtcaacagaagaaaagccgatatccattagcatttgaataagtttgtaaccatgaagactccagtcttttagacagagaagtaagaagggaactaagaagttttttggcatggagtttggttgtttcgcttggttgctctccaaactttcgcgttgttctggttcattttgtagcatgattgtgcatcacctcatgaatcagttagatggaattttttgcttataagtgcaatttacacctatctgtttttaaagtcaacacatttgttagaaaatagaaaaaaataaaatatagacttgaagttttattcagaatattagaaaatagtgaataggttgaattgtttcaaaaacgaaaaaaggagtgtaggtaaagtgattgatcaaaaattcgatccactacaagcatggaaaaatgcttatgaacaaaccgaaacattttggggaaaagcgctcaatgaaacaattaaaacagaagaatattctgcttggatgggcagcgttctagatttgaatttgttttatcaaaaagcattaaatgatacgacaaaaagctatttagaacaagtaaatgtgccgacgaaagaggatatcgcaagagtggctacgcttgttattaacttagaaaataaagtagataacattgaggagtttctagaggagaaagtagattctttaggacaagctcctacattaaagcgtgatgtgacgaaagtaaaacaagatattcgtacgcttgaaacaaaagtagatcaaattttagaattgctagaaaagcaaaatgcagaactagctaaactacaagtacctgtaaaagaagaggtaaagcctgcgaataaaccagaaaataaaaaatgataaaagcgcttgtttataacatgtaaaagagagagggagaatctcttttcgtgtataaacagcgaaacataattatatatggactctatagtatgagtaccaaaatgattcataacaatcgttcacaaattcatttaagggggaaaagaaatggttcaattaaatggaaaagtagcaatcgtaacaggtggagcaaaaggaattggaaaagcaattacagtagcattagcacaagagggagcgaaagtagttattaactataatagcagtaaagaagcagctgaaaatttagtaaatgaattaggaaaagacggacatgacgtttatgcagtgcaagcggatgtttctaaagtagaagatgcaaaccgacttgtagaagaagctgtgaatcattttggtaaagttgatattcttgttaataatgctggtattacaagagatcgtacattcaaaaagttaaatcgtgaagattgggagcgcgtaattgacgtgaatttaagtagcgtatttaatacgacaagcgcggttcttccatacataacggaagcagaagaaggaagaattattagcatttcttctattattggtcaagcaggtggatttggccaaacaaactactcagcagcaaaagcgggtatgttaggatttacaaaatcattagcgttagaacttgcaaaaacaaatgtcactgtaaacgctatttgcccaggatttattgatactgaaatggtagcagaagtaccagaagaagtacgtcaaaaaatcgttgcaaaaatcccgaaaaaacgttttggtcaagctgatgaaattgcaaaaggtgtagtatacctatgccgtgacggtgcgtatatcacaggtcaacaattaaacattaacggcggattatatatgtaatgaagtaagaaaaaagtgcatatccatagcaggaatgcacttctttttttagaaggaaatcgaccaaaaaggagatagaaaaatgactacattcgcaacagaatgggaaaagcaattagagctatacccagaagagtaccgaaaagcataccgccgagtgaaaagggcgagtgaaattttattacgtgaaccagagccccaagtcggattaacgccgaaagaggttatttggacgaagaataagacgaagctttatcgctacattccaaaacaagaaaaaacacaaagagttccaattctattaatatatgctcttattaataaaccatatattatggatttaactcctggaaatagtttagtggaatatctagtggatcgtggttttgatgtgtatatgcttgattggggcacatttggtttagaagatagtcatttgaaatttgatgatttcgtgtttgattatattgcaaaagcagtaaaaaaagtaatgcgaactgcaaaatcggacgagatttctttacttggttattgcatgggtggaacgctaacttctatttatgcagcacttcatccgcacatgccaattcgtaatttaattttcatgacaagtccttttgatttctctgaaacaggattgtatggccctttattagatgagaaatacttcaatttagataaagcggttgatacatttggaaatattccgccagaaatgattgatttcggaaacaaaatgttaaagccaattacgaactttgttggtccatatgttgctttagtagatcgttcagagaatgagcgcttcgtcgaaagctggagattggttcaaaagtgggttggtgatggtattccgttcccaggtgaatcatacagacagtggattcgtgatttttatcaaaataataagttggttaagggtgaactcgttattcgcggacaaaaggtagaccttgcaaatattaaggcgaatgtcttaaatatttccgggaaacgtgatcatatcgctttgccatgtcaagtagaagcattactagaccatatttctagcacagataaacaatatgtatgtttaccaacagggcatatgtctatcgtttacggtggaacagctgtaaaacaaacatatccgacgattggaaattggcttgaagagcgttctaattaaaaataaaaaaatccaactagcctatgttagttggatttttttatgaaaaataacaaaacatagaaaggagaaatttatattttaggagtataattatgaaacttatgatgggtaagttgttttggaatacaggagtttctgtaccttgttatccactgttagaaaatgatatgatatgtgatgtgctcgtagttggaagcggcgaagccggtgctcatatagcgcattcgttagcgaaaattggcatgagtgttacacttattgaaaaaagagcaattgcgtgtggtagcacagctgctaatacaggtttactacaatttcttcatgataaatcgttaacctctcttatccatacatttggtaaagaaaaaggggtacgagcatataagctttgttatgaagcgctaagaacaatggaagaggttataccgactcttgatattaatccccattttattccgcgaaatagtttatattatgcaagtaaaagtgaggatgtctcatttttacaagaggaatataatacgttacagaattatggatttccagttgaatattttacagaagctgatattaagaaacgttattcttttgcaaaacaagcagcgttatatacgcaaggtgatgctgaggtgaatccgtatttactagcgtatagttttttgcataaagcaaaccaaatgggagctaatatatatgaacatacagaggcaatacatataaaaaaacgcaaaaatgatttaatttgttacacgaaaacaggaaatcaaattgtagcaaagaatattattatggcgacaggttatgaggcgctttttggaaagaaagaaaaaaatacaacagtagacacctcttatgcaattgtaacaaatgaaatagatcaatttgaaggctggcatgagcgatcgttaatttgggaaacggcacggccttacttatattttcgaacgtatcgaaaccgcattattgtaggcggattagatgaagcgctacaaattcaaacaattggtgatacgaaattattgcataagcgtgatatccttattaatattgtaaaagagatgttcccgcagtataaaaatatacaggcagactactattgggcagccgcatttggtggtactcatgatggtctccccattttaaaagaagacgaaaagatacataatttgttttatgcattgccgtatggaggtaatggaactgtatatggaatggtctttgccaaattatttgagcagttatttacaaataaagaaagtaaagatttttctttatttaatcgatagaaaaaaggtagcgaagtgatggaatgagagatataaaaaagtttttacaaaaattacgtcctgtacaactcatcgttttgttttatttattagcggtagttgtatcggtgatattgcttagtttaccgtttgttacgaagcctggtgtgaaatggacatttatagatgcgctttttacatcggttagtgcggtaagtgttacgggactgtctgttattacgatttcagatacgtttactacagcaggaattattgttttagcccttattttacaattaggcggcttaggaattatggcgcttgggacatttgtttggatcattacggggaaaaagattggtttgcaaagaagaagattaattatggcagaccataatcaaggaaatttatcgggtctcgtagaattgatgcgttctattttaattgtaattatttcaatagaacttattggagcaatcttattggggacaagatttttactttactttccgacttggcaagaagcttattttcacggtttctttgcagctgttagtgccactacgaacggcggatttgatttaacaggacaatcattaattccgtataaaaaagattatattgttcaaatgattcatatgttactaattattttaggagcgattggtttccctgtgctaatggaagtgaaacaattccttagtaaaaggagacaacaattattccgtttttcattatttacaaaattgacgacaacaacattttttgcactcgttgttgttggtacaattatgatttttttactggagagaaatcattttttagtaggaaagtcatggcatgaaactgtattttatacattattccaatctgtgacgacgcgaagtggtggacttgcaacaatggatatacgtgaattatcacaaccgacgcttttatttatgagtatattaatgtttataggggcatctccaagttcggttgggggcggaatacgtacaactacatttgctgttagtatattgtcactatacacctttgcaaggggcggtagaacagttagagtcttcaaacgtcagctacatgaagaggatgtactgaaagcatctgtcgttatgacgatggggattttgttatgtgctactgcgctattcattttatctattacggaaaatgtaccgcttatgagcttaattgttgaagtttgttctgctttcggaacgacgggactatcaacaggtgttacgcctgatttaacaactgttgggaaacttgtacttattgtgcttatgtttatcggacgcgttggtattttaacatttattttagctagtggtggaagggaacaaccacctcgctataaatacccgaaagagcggattattattggatagtatgaaaccattctacctacgttaggtagaatggttttttagtcgttaatgccaaattgtggatgcataaaagcttcatttttattatccacttcgttttttagtaactcttgattttcttctgaaatccacccaatatcatttgtcggatggatccactcatcgccagccataatggcaggatctacttcatcactccaattgttaagcggactgttctcggaattatatttactgtctccaattacaacattatattgattcacaaaaggttgttgcatcgtttttcctgttcctttaaaagatggaaaattcatttgatgcgggagcgtttcgtctaaaatgggtgattgaatcttttcttttttcttcaaaattatcgctcctttttataatgatttcttcatatgtagtatttccatctaacgcctcttatgtacttgttaacacttgccagtaataattattttaagttgtttcaaactagagtagaaagtgatttcttgagagcaggtgaatgtattggtaaaaagaaaagtgaaacaaaatgcggcaatcaataataataaaactccgaaagaaagcttaccagatgcagaatttgcattagagtatgaaggagaaaatagcgcaaagtatgcgaatcgtaattcaaaaaaagggaaacaaaaatgaggcgttttttacaaacgcctcatttttttgtgggattataaaggtttttttaattatttgtaaatttagtgttttctattagcagaaaaatgcgaaaaaacatagaagtagcaacgtattacacaaaaacaaacaacaaacaaaagattaatgttggtttaatactgcttttacactagttgtttatatttgagttgtacataagatttgtaaaaggagagagaaacagtgaaaaaaacaatctttaaagctgtagcgactggaatggtattttcgttattaatggggtgtggtgcaaagaaggaagaaagtgctggagcgaaagtgaaagatgacaaattatctggatcattaactgtttacacagcaattgaagaagagcttgtaccaatttatcttgattcctttaaaaagaaatatcctgatgtgaaattgaacattgtacgtgattcaacaggagttattactgcgaaattactagctgaagggaaaaatacacaagccgatgttgtatggggaactgcggcatcaagtctattagctttagataaaaaagatatgttaaaaggatactctccaaaaggagcagatcgtgttcttccacaatttaaagatgataagcaacctgaaaaatgggtaggaaatactgcatttatgacggggattgctgtaaataaagaagagttaaagaagaaaaatttaccgatgccagaatcatatgaagatttaacgaaaccagagtataaaggaacacttgttatgccacatccagcatcatctggaacaggatttttaacagtttctgcatggctacaaatcatgggtgaagataaaggctgggattacatgaagaaacttcatgataatatggcaagttatacgcattcaggatcaaaaccagcgaaattagcaggagcgggtgaatatccagttggcgtatcaatggtttatagtgctttgaaagagaaacaaaaaggtgcaccagttgaagttgtattgccgaaagaaggattaggttgggaagtagaagcgaacgcacttattaaaaaagataatgcaaaaaatgaaaaattagcgcaagcatttttagattgggcgattactgatgatgtaatgaagttatacttcgagaaaaatggatttgcgacaattaaaaatgattataaacttccagatggattccctaaagatgtaacagaaaagttatacaaaaaaaatgactttaagtgggcagcagaaaatcgtgacaaaattttagaaaaatgggaaaaagagtttggccaaaaagcagaaccgaaaaagtaagtgagtgggagagagaaaaaatgagcgaatatttatcaattcaacacattcaaaaacagtttgatgcatttacagcgttaaaagatatttcttttactgtgaacaaaaatgagtttgtatgtttattaggcccaagtggttgtgggaaaacgacattgcttcgaattttagcaggtctagaagaggcaacaacaggtagtatagctgtgaatggaaaagatattacagcattacctcctggaaagagaaacttcggaatggtgtttcaatcgtatgcattatttccgaatttaacagcacttgaaaatattgaatacggcttaaagacaaaaaaatatggaaaagcagaagtaaaagagaaagcgctagaggcgttaaaacttgtagatttactgaatgtaaaagataaatatcctgctcaaatgtctggtggacaacagcagcgagtggcacttgcacgtgcgctcgctctgtctccagatattttgttacttgatgagccgttatctgctttagatgcgaaagtacgtgaaaagttacgtagagaaatgcgtgatttgcaagagaaagtaggagtaacaactattatggtcacgcatgatcaagaagaggcattaacgatggctgataaaattgttgtaatgaatcatgcggaaattatgcagattggaacaccagaggagatttatcaaagaccagccaatccgtttgtggcagattttattggttctattaatttcttttcgaaaaataacgaagagcatgcaattcgtcctgaacatgtaacaattgtacaaaaggacggtattaaaacagttgtggaaagtatggaatttcgtggatctgtatatcgaacggaagtgcgagtcgtagaagaaaacacacacctttataatgagaaaattgtagtggatatattagcatcagaagtagaagtagctgatattagaaaaggaaagccgattcaaatctctttctcagaaaatcatatgttgtcatatggaaagaaggtcattgtatagatggagatgttagaaaactacaaggtagaaagtgcgaaaaaaaagattaagagaagtatagggaaagaggaatggatccaaaggcttgtaattatcggtatgattctttccttccttgtcatacttgtattaccactattacaactatttacacaagctttttataataaagatggagttttcattggtttagcgaatttcagtaaatattttacaacaccaactttagttcagtctttacaaaatacggtatggatttcgggcgcaacaacaattatttcagtttcaattgcattcgtttacgcatatgcaattgcccgtacgaatgtttttggaaagcgtgtatttcagtatgtagcgttattaccattgtttgcaccaacgatgatgcacggtatagcacttacatatttatttggtaatcaagggctagtaacgaaaggaatgtttgggttatttgaaggtatacaaatccctttatatggaccagtaggaattgtaatagctgaagttatgtatacatttccgcaagcctttctcatattactaattgcctttcaaggatccgattatcgtttatatgaagcttctaatatgctaggggcgagtaaaacaaaacaatttttcacggttactttacctagtgtaaagtacggattaattagtgcaatgtttgttgtgtttacacttagtttcactgattttggggcaccaaaaattgttggtggacaatataatgtgcttgctactgacgtatacaaacaagtaattggacagcaaaatatgtcgatgggtgcaacagttggaatgattttattaatcccagctatattcgcatttgcagttgatcgtattacgcaaagaaagcaggcgaatttcttatcttcaaaagcagtaccatacagaataatagctaataagaaaagagatgtcatctcattcatatactgtagtgtgattacatttatgatcattctgttatttgtggcagttggtattgctgcaagtgtgaaagtatggccatataatatgagttttacatttgagcattttaatttttcgagtttaacaggagatggacttgaagcatttaaaaatagcgtaattgtttcagcagttacagcagttattggggcgattttaacatttgtatttgcatatgcaattgagaaaatagaccagctacaattcttccgaaaaacaggttactttttctctatcgttcctttagccataccaggtttagtactcggattaggatatgtctttttctttagtcaaccaacgattcaaattttgggactatcagtaacgaacccgtttcattctttatacggaacaatcgctgtgttagtactagtaaatatcattcatttttattctgtaacatttgtcacggcaacgactgctttaaagaaattagatcgagagtttgagcttgtttcgcagtcgatgggtattccgttttataaaacattctttagagtaacggtaccaatgtgtttaccagcaattttagaaatggtaatgtactacttcgtaaattcaatggtaactgtatcggcagttgtattcctatatgcagctgattttaaactagctgccgtatcaatcgtaaatatggatgatgcaggaaatgtggcgccagcagctgcaatgagtgtgcttattgttgttacaaatattgtagtaagagttgtatatgaatggggaacgaaagcacttcgtaaccgaacttcacaatggcaaaaaagataagtaagaaaggtgatggacagaatgaaaattgaagcagttatttttgattgggcagggacaacagttgattacggatgttttgcaccactagaagtattcatggagatttttcataaacggggtgtagcaattacagcagaagaagctcgtaagccaatggggttattaaaaatagatcatgtaagggcacttactgagatgcctcgtattgcgagtgagtggaatcgtgttttccgacaattaccaacagaagcagacattcaggagatgtatgaagaatttgaagagattctcttcgctattttaccgcgctatgcttcgccgattaatggagtaaaagaagtgattgcttctttacgtgaaagaggaattaaaattggttcaacgactggttatacgagagaaatgatggatattgtagcaaaggaagcagcgttacaaggatataaacctgattttcttgttacgccagatgatgttccagcaggccgtccatatccatggatgtgctataaaaatgcaatggaacttggtgtgtatccgatgaaccatatgataaaagttggggacacagtatcagatatgaaagaaggtagaaatgctggaatgtggacagttggtgtaattcttggcagtagcgagctcggtttaacggaagaggaagtggagaatatggattcggtagaacttcgtgaaaaaatagaagtagttcgcaatcgtttcgttgaaaatggggcgcactttacgatagaaacgatgcaggaactcgaaagcgtaatggaacatatcgagaaacaagaacttattatttcataaaaggggaataggatcatgactgaaaatcactacttattattaacaccaggaccattaacgacaacaaaatcagtaaaagaagttatgctatacgattggtgtacgtgggatgatgaatataatacgatggtgcaagaagtaagagctaaacttgtatcgttagcgacgaaggaagaagagaaatatacaacagtgttaatgcaaggaagcggtacgttttcagttgaagcagtaattggttctgttattccggcaaatgggaagattctcgtttgtacaaatggtgcgtacggtaagcgcattgtgcaaatggcagagatgttacagattgatgtagtggtcagtcaaacagaagagtgggaacctactaatattgtagaagtagagaagttattgcaagaagataaagagattacgcatattgcagttgttcattgcgaaacgacgacaggcattataaatccaattgtagatgtatgtaaattaggaaaacagtatggaaaggttacaattgttgatgcgatgagtagtttcggcgggattgaaatagacattgctgatttacaaattgattttttaattagtagtgcgaataagtgtattcaaggggttcctggattcggatttgtaatcgcaaaacgtgatgaattattgaagtgtaaagggcaaggacgctctttatctcttgatttatatgatcaatgggaaacgatggaaaaacaaaatgggaaatggcgttttacttcacctacacatgttgtacatgctttttatcaagcactacttgaactagaaaaagagggaggagtaagagcgcgttacaatcgatattacaacaatcaaaaactactagtaaatagaatgggagaaatcggatttaagccactagtagatgaggaataccaatctcctattattacatctttcatttatccaaaagagggattcgagtttcaacagttatataacgaattaaagcgttatggatttgttatttaccctgggaaaatttcgaaagtagatacgttccgcattggaaatatcggtgatgtacatgaacaagatattaatcgcttagttgatagtattgctaaaggagctgttattgggtgaaagtattttgcttaggtggagcaggtaaaatttgtcgcgaagctattttggatttagttcaattttcatcttttgagacaattacagtagctgattttaacgaggtagagggccgtaaagtagtagaatggctcaacgaccctcgtgttgattttgtaaaagtagatgtaacggatcacgaggatacggttgcaaaaatgattggttatgacattgtaatggacggtacgacgataaagttaaacagattgtcgacccgctgtattgcagaagcaggatgtcacggtgtgaacttaaatggatttggtgaagaaaatgaatcgcatgctatatttgttgaaaatgaaaagatatgtttacctggatttggcatgacgccgggtgtaacgcaaatgatggcaatgcatgcagcaaatcaattggatactgtagagtctgtccgtgtaagtcacggttcgtatcgtccgattgctttttctgcatcaattacagagacaacgacatatgaatatgatccatatttaccatcgcgtacagtgtatgaagatggtgaatttaagcaagtacctccgtttgcgcgtccgagagaaatagaattgccagagccttatggtaaggcaacgcagtatatcattccgcattctgaaacgattacgctagcaaaggcattagaaaataaaggtgtcaaactgatagagacgagaggaacttggccacagcaaaatatgcaacttgtacgtgctttatatgattacggcatattgcgtaatgatcagattgaaataaacgggaaagaaataggcattatggattgtatttcacagtatttattgcaatcgaaagaagggcaagaaacagagctttatggttatgcacttcatgtagaagtaataggtatgaaaaataatgagaagcaaagacatgtgttatatcatacacatccgttatctgatggttctgttgtaggatgggaaaaattaagagcgtatacgagaaacgtcggtattccatttgggattgctgcagagttaattgcaaatggaaatgtaaatagggtgggtgttgttacgcctgaagaagcctttgaaaatccacaattgatttttgatgagctagcaaagcgcggtattcatattcatgaagaagtttctacttataaagaaaattatagctttgtataagtaaggacgtttataagggagatataaatgaggtgaagctatgtctgtagtaggagaagaaagaaagcgaaccattcttgaaaaggtagaatttaaagggaaagtaaaggtttcagaattagcgagagaatttgctgtatcaacagaaacgattcgtcgatatttagaagaattagatcgtgaaaagaagctgaaaaaagtgtatggtggagctgttcaacttccaggcgctggagtagaggcaccaatgttagaaagagaaatgctacatatagaagagaagaaaagaattggttataaagcagcgacatttgtagaagacggtgatgtcattgcaattgatgatggaagtacaccgcttcaaatggttccataccttgttcatcgtaaaaacttaacgattgtaacaagttcatttccagtcgcaacacaattaatttcttctattaataaaaagatgtttcacggtgaagttttgtttataggtggaaaagtatctccaaagcattcgcgtgtatcagggtctatttctcagcaagtcatacagcaatttcattttcataaagcgttcgtttcgattgatgggttattacctagttttggagtttccagctttgaattagagaaagcgaaattgtcagaggcgatgatgaaattagctgagaaaacatatattttatgtgatcatacgaaggtaggcgtgaaagggaattatcgtatagcagcaatttcgcgtattcaacacgtaatttgtgataaaaaaatgccatatagctttgaagaagaacttaagaagcataatattcagtggacagtttgttaaatacagtgaaagcacataaactcccgcctaatttttaggagggagttttattatctgtaaatcgtaaaataaaagatttgcagttatgcaaaaagtggacacattttctcacctctttcatataatttaccaatacaaaaaaagttggtcgaaggaaagaagggagaacatgtcagaacgaatatataataaacttgtattgtacgcgaatattttgcaaaaaatcggtgtcatcaatgagaaggaaaaaagtgaaattcttcatacgataggtaaaaaagccctttgaataaagggcttttttatttttatatctttaaaaatataaatttaatgtaatattctcattgacaatgataatgatattcattatcatttatttgtggaaaattgataatacttatcaattgtaaagattatatatgataggggatattattttgaaaaaaattacatgaaggcgctagtagtagcgacaacattagcaattccatttgctacgtactctactccagcattagcggcattaaaagttgaagcaaatcaatcggtagcagcagcgagtaatcgcacgtatgatactgagattaaaatatataaggaccaaaaagatgagccatctatggtttctcaatatataaaagatcctaaagtaacgattgcagctggcaaaaaaattgtcactgtaacaatgcaagatagtgattattttcaatatcttagaatagaagatagaaaccagcctggtgtatttcatgatgtgaaggttttgtcagaagataagaggaagaatggaacgaaagtagttcaatttgaaattggtgagtttgagaagaagcacaatatgcaaatgcatatacttattccagctattggatatgatcacaaatatcaagttcaatttgaaattaaagatccaactttaggtaacaaagaaacagagaaaccagatgataactctaattcaggcaatacggaaacggataatccagttgataatcaaaatatgataacagataagaaattaagagagcttgttaataaaaaagtatttaatagaaaagatttaaatacaccaattacgaaagaagatttattacaagtaaaggatttgtttttaaatacgaatgagatacttgattatagtgcattaaaatatatgccaaatttaaaatctttaacagttgcgaatgcgaagataaaagatccgtcgttctttgcgaacttaaagcaattaagtcatttagctttgcgtggtaatgaattttcagatgtaacgccacttgttaagatggataatttagaatctcttgatttaagtaataataaaattacaaacgttgcaccactaactgaaatgaaaaatgtaaaaagtttatttctatcaggcaaccaaatagaagatgtaacagcattagcgaaaatggaacaactagattacttgaatttagcaaataataaaattacgaacgttgctccattaagcgctttgaaaaatgtaacatacttaactttagcaggtaatcaaattgaagatattaaagcgttatattcattacctttaacagacttagtattaacacgtaataaagttaaagatttatccggcattgagcaaatgaagcaattagaagaattgtggatcgggaaaaatgaaataaaagatgttactcctctaagtaagatgacacagttaaaacaattacacttacctaacaatgagttaaaggatattacgccattatcaagtttagtaaacttacaaaagcttgatttagaagcgaattatatttcagacttatcaccagttagtaatttgaaaaaattagtatttctaagttttgttgcaaatgaaatccgtgatgtccgaccagttatagaactaagtaagacggcttatattaatgtccaaaatcaaaaagtatttttagaggaaacagaagtaaataaagaagtaaaagtacctatatatgaaaaagatggtgaggtttctacgaaaatccgtctgaagagcgataacggtacgtatagtaatggtgtagtgaaatggagtacaccaggtgagaaaatatatgaatttggtgtgaaagatccattcgcggatacaggaattttctttacagggtctgttattcaaaatgtagtagaaagtaaagacggtaatacgtctaaagaagatgagaaaacagaagtggtagaatttaaagatgtaccaaagggacattggtcagaagaagcaattaattacttagcgaaagaaaaattatttataggctatggaaatggtgaatttggatttggtgataacattactcgtggacaagtagctcttctaatacaaaggtatttaaaattagaaaataatctagtaccaaaaacggcatttacagatacgaaaggaaatatgtatgaaacggctattgatgcagtggttcaagctggaattatgacaggctatggaaatggtatgttccgtccagatggagtattaactcgatatgaaatgtcagtagtattacaaagagtatttcagttaaaagaaaatgaaaatagtgcagagaattttaaagatataccaaatgaccattgggcgaaaggatatgtgaaagctttagtggataataaaatatcaaaaggcgatggggaagggaattttttaggagataatttcgtaacacgtgaacaatatgcacagtttttatataatgcaataaagaaataaagtgaaactttaatcagtgggggttttgttcattccccactgattattagccctcactaatcgggctgcccgttaatgcggaataaaaaatgaggaaaatacgctattctttaattaaagagtagcgtatttttatgtacaaaatgaaataggaaatagataggagtatagacatatgaatagcctattttaaagaagaaccacgaaactatattgacaaaaaagcgttctcatgtgataattcaattaatttttagaataatcaaaaaatattccttttacatagaaaggattcgaaccttatatgaatattatgccgggggtgacgaaatgttattttttctgaagaaatggaatgaattaaaagatgtgaaatctgaattggcacttcgtgattggttttatggtaccaaaattagcttatcgctatgtacgtcaaaagagccgttaacattcttagtaaatgttgaaggaagagataaagggctattttcggaagaagattttattgtcgtaaattgcatgtgcgagtcagtatttgaaaatgaagaaaaaccagctgcagagtcatttatgcatgcggatatttataaaaaaagtagtgcaggatgtattttacaagtgcagactgtagatagtcatttaatatcagagttatatggggaagaaggagaagtaacgttcgataaacgcagtgtggagcgtgttttcggaaaagaaggtataacagaaatgacaattccaattgtagaagatgaaaaaaaattcgctgatttattagaaaggaatgttccgaatttcattgaaggtggaggagtagttcttgttcataattacggcatgattgtgtggggaaaaacgccagaagaggcgaaaaaatggctagagggtatagaatatttaatgaactatcatgtaaagttattaatgattaagggggcaaggagctctgttatataaaaatggatgtgatatagctacaagttaataaataaatgaaagcgttttaaaaataatttcactcataaaatataggtctccttattatatatagattacatgttgacatgtaaggaggaacatattttgcgagttaaatatcattttctgccaaagcagcaagtaacattttgcaaaataaatgattctggtgaagaggcactgcaaatgatgaacgaaacgggatttcgagccatcccggtattagcagaagatgagaagaaattcacggggattatttataaagtagatttattagaaaaaaaatgcaatagcggattagagcatgtaagtgcaggggatatgctctacgattccaatgcatttatttttgaaaaggattccttcttcagagccttttatgtaattcgtcggcttccgtttttagccgtgctaaatgattataatgaatttgtcggtatgttaacgcattcgaatatatttgatgttattgaagattcatttggtatgcgaacaggtggttatatattaacaattgcaacacaagattgtaagggaacgattaaagagcttgggacattgttaaaagcatataatatcggtggcctatttacgctagataacggtgatcaatatatccgccgcgttattgtaaatatatcagatgagttagatgaaacaaaattaaagcaattaatcggaaaaatagagaaaaaaggattcagagtgagtcacgtagattatatttaagttaaaaagaaaagtacctatctgttatatatagataggtacttttttgtcccactatttgtgggtagtaaaatccacgcctcaaaatttggtgaaagcaaagaagttaggtgggcgggtgttacctgtaaaagcccaattggtgaggctgattatatgtgagtaatgaactttattttgaaacaggaggcggggataatgctagatcagataagaaaataaagtctgcatgctcacgaattttagggatagaagtttcaataacgcgtgatgtaatttcacctggggggcccacatgcccgatagctaccataataggtttttcttgaatttttttgatgagtaattgggcttgttttgaaatatgtcctgctgtatacacatcatcaaaaaatagttggttttcaataataggaactcctaattcttttccgatttttgggacgacactattaggattcgttttactatctaagtaaaataaaccgtgttttttacaagcagcaagtataaggcgaacaattctttcatccgctgttacttttgaccccatatgattgttcattccaattgcatgcggtacttcttgaatggcttgttcaagtcggttgtttatttcttcatcgcttaaatcagttgtaattgctttcggcccaagccattcttttttaccttttataggttccattggcatatgtataataacttcatggcctttcttatgggcagctattgcgtcttcttttgtggaaggaagaaaaggcataacagcaacagtgagtggaatgggaagtgataacatttgattagtccccttcatattattaccgaaatcatcaatgacaatagcaactttattcgtatgagcatttgcttgaataggaaataagaaagacggtaaaaacaaaacaatgatgaataatgcaatcgtatattttcgcatataaatatttcctttctattgttatcctgctatttgtgggtagtaagactcccacctcaacattgggctggataggtgggagattaactgcctacccgattggtgaatgctaattatcagtgggggctgaacaaaaaaacactgattaaagtttcactttatcaatcatcattatgttttgcttttttatataaattaaacaaaaaatgtcgaagaaaagtaggtggaaaattaagaatccccggtttacgtagaatttataaaaaaagaagatgaaaaaaatgtctattattgcgaatgtatttacaaagatagaataatttgtaataattctcaaagtgagggtaaagatttgtaaattacagggagaaaatgttaaattttctgattcttcaaatttgcatatgattaagtagttaaaaaaagtcaatggagaagtgaagttaagagcatggaagtataataagggggatatggatgtttactgtaaaaaggaagtacacattagaaaagctttcacgtgatattcatatgaaacgtgaagaaatgattcaactaggattaacaagtgggctaaatagtagggagacaattcaagttagtcaagaattggacaagcttattttacaatatcaatgttataaagaaaaacaaacaccgaaatggttttcaattataaaaatacctattttccaaatcgggtatgaaggaaaatcaaataatttttggcgaatgcttgtggctggttttatgaaataagtataattacccttataggataaggataattatactatgtgtaacggaatttcgatatgaactgtcgttccttcattttctgtactgtcgataaaaatatgcccattatacatctctacaattcgtttacatatgacaagtccaagacctgttccagtatctttattagtaaagaacggatgaaagaggtgtttttgaatatgttgcggaatcccttttccagtatctgtaatatgcagttgtgcgtgtgtttcattgttttttactacaatggttagtgtatcattagaagtcatggcctcaattgcatttttggtaatgtttaaaaccacttgtttcatatggtctttcgaacaacggatatgaacaggatggtctggcaaatgtaaatggaatacaatgttatgtaaattcgcctcagattgaataattaatgctacctcatttagaattgttcttacatcatatgtttgttcgatgatggcggttggctttcctagaataagaaattcacttacaatttcattgattcgctctatttcttgttcaattacggaaaagtagaactgatcttgttcatctttatatttctcttttaatagagcgacgagtcctttaattccagtaagaggattacggatttcgtgtgctgtactcgctgcaaaagttccaactaattcaattttctgtagttcattttgttgtctttcaagttttgtttgacgttttaacaacatatattgagcaagcaaaaataaaatagacattaaaaataaagtagctatacactctattgcaacccactggtataaggttttttgatgaatgggtaatggagaaacagagaccttccaatttaatctttggagtggggtagtaagcatattagaatgcgtatcacttgtgtcgttattatcatcggttagaaaaactacatcatgtttatcagttacctcaaaatggtattgtggtttaatggcatttaaagaagaggaaatgtaatcaaagcgtaaactagctaataataatcctgagagctccttctgtttattaaatatgggggcagcaatcataatagctttatgtccaagaacgcgatcagtaatgactgatgatacagtggtttttttagtttggagcgcgtcttgaatatatttacggtctgaaacatctataggctttgattcatcttcagatgcgattgtaatgactccttctggtgtagcgtaatatagaccagaaaagcgtgcatcgtttccatctgtatcatgtacaatttgtttaatgccatttatattaccagtctcggtgcctacaacttttgcaagcatgtctaaagcagaaattgcttcaccaagatgatgatccaaataatctctatataaaaagagaactgtatgagcagataatttgttttcctgtttcattttatatgtatgatacgaataaaatgtagcaccaatccctattgtcggtaggataacaagcaatatatatataattatgctttggaatttgactttcaaatgtggtactccttctttttttattatcattatatataaactatgttaaaattgtcatgtttttattcaagaatgatttttaatatattaggggagaggaaatggatgagtgaatgctcattcggaattcacatgaagtatgaagtggtattttctttttattgctgagaatttaagtgaagggttgaaagttgtatgacatcaaataatgaacgagaagatatttctcaatctttaaaagtatttattgcattatctcgtgtacatcgttctgttatggatactacaaataaatctatacaaagtaacgggttaaatccaactgaatttgctgtattagaactgctatatcataaaggcggtcaaccactccagcaaattggtgagcgcattttaatagctagtggcagcattacatatgttgtagataagttggagaaaaagggattagtaaagagaatcccatgtccgaatgacagacgtgttatttacgcgcaattaactgagtctggcgagaactttattgcttctatttttccggggcatgagaaagttatacatcagtcttttgaaatgttaacgaaagatgaaaaagatgaattacttgatttattaaaaaaaattgggaagtatgaaaaataatatgttccaaaggagctttggataaataaatccaaggcttttttatttgtaatgaactcatggcagtcactgccgaaatttgttggaaattaagaggggattcgagaatacgtattgaattataataaaggtatgtaatggagaggaggctcgttcatgtcatttaaagactatgaatataaacgcccaaatattgaagagttaaaagagaaatttactgttgctttagagaagtttgataacgcaaaaactgtagaagaacaaaaacaagtcattcattcaattaatgagattcgcaacgattttggtacaatgggaaacctttgttacattcgccattctgttgatacgacggatactttttataaggaggagcaggatttctttgatgaattctctccagttgtacaaggatatggtacaaaatattataaggcactcattaattctccatttcgtgaagaattagaggcgtattatggaaaacaattatttgctctagcagaatgtgatttaaaaacatattcagatgaagtcgtgaaagatttacaattagaaaataaattatcatcgcaatatacacagttattagcatctgcaaaaattgactttgctggagaagaaagaacgttatcgcaactgattccgtttatgcaaggaaaagaaagaagcgaacgtaaagcagcaagtgaagcatactacggatttttagctggaattgaggaagaactagatcgtatttatgatgagcttgttaaagtgagaacgaaaatcgcaaaatctttaggtttcaaaaactttgttgaacttggatatgcaagaatgtaccgtacagattataatgcggagatggtggctaattaccgtcagcaagtgctagattatatcgttcccgttacaacggaattaagaaagcgacaacaagcacgtatcggtgtagagaagttagcttattacgacgaaaactttgagtttgctacaggtaacccaactccaaaaggagatgcggattggattgttgatcatggaaagacaatgtataaagagttatcgattgaaacagatgaatttttcaatttcatgctagataatgatttattagatttagttgcgaaaaaaggaaaagctggtggcggatattgtacatatattgagaattataaagcgccatttattttctcaaacttcaatggaacatctggtgacattgatgtattaacacatgaagcaggtcatgctttccaagtatatgaaagtcgtaaatttgaaattccagaatataattggccaacatatgaggcatgtgaaatccactctatgagtatggaattctttacatggccatggatgaagctattctttgaagaagatgcagataaatattacttctctcacttaagttcagcacttctgtttttaccttatggtgtatctgttgatgaatatcaacattatgtatatgaaaatcctgaagcatcacctgaagagcgtaagacagcatggcgtaacatagagaagaaatatttaccacatcgtgattatgaggataatgattatttagagcgcggtggtttttggcaacgtcaagggcatatttatagctcaccgttctattatattgattacacgcttgctcaaatttgtgcgctacaattttggaaacgtgcaagagataatagacaagaggcttgggaagattatgtgaatctgtgccaacaaggtggaagtaaatcgttcttagaattagtagaagttgcaaatttaacatcaccatttgctgaaggctgtgtgaaaagtgttattacagaaattgaagcatggttacatgcgattgacgacacaaaattgtaaaaaacatgcgctttttttcacatgtttaacatcgacataatgggaaaatgatgagataataaaagaaaattcagaatactaaagaggtgtttctaataaggagcacctcttttcacaaacaaaaggggggaacaagtatgcttcaatctaatatggatgtaagtttagaaagtttagtaaactcattacagtctactcgaagcacgctattatcagaaattgaaatgttaaatgacacagaagtgaatgtaaagccacgccgtgataaatggagcattattcaaattttacaccacttgcatttagttgaacaatctgtcacgtctgcccttgtatatgctttacaaaaaaaggaaagaaacatgactccatttaaagacctccaacttacgcttgatcgcacacataaacgagaagctcctcagcaaatgcaaccaacagaaactttaatgaaaaaacagcaaggaattcaattgctagaacattcacgccaagaactattacacgcgcttcatagtgttatagatgaaaaagatttatttgaaaatggattaaagcatcctgtttttaatgatctgaatttgtatcaatgggttcaatttcttgatttgcatgaacaaagacatcttacgcagttaaaagaggcgaaacatgcaattttgcaacgctaaagtggaagaagtgggaaaccacttcttttttgatacgtgcatagttttctttcttattttggaatactacatggagaaagaaaagaaggagttgaaaaaacatgtctaagaagaagcgagaagaagagcgcgcctggaaagcacgtaaagaaaatcaacaaccgcacggaaaagtgaaagcttttgctgaattagttgaaggaacagaaaaaacgtgatgagtatttcatcacgttttttgtatgagtggaaaagttaataaaaaggttgtaccgattcctttttcacttataatatcaatttttccattcatagcttgaacaacactgaatacgaccatcattccaagtccagtacctttttctttcgttgaataaaaaggagagccaagacgttttacttgttctgaatccataccgactcctgtatcttttatatataactgaatatgcttatgatcaggaactaatgtgaaataaagatcaccgccttttggcatagcctcaatgcaattttttaaaatatttaataaacattgatttagtttttgcttttcaccagcgataaaaaaagaagtgctttgctttatataatgagtacgtacatttgttaaattagtaagcggtgtaattaacgacaatgcatgtagtaattcttcttctaactgtaatgtttgttctttttcaatgcttggtttagcaaaggttaaataatctgtaagaacatgatttgcttgttcgatgccgttaatggcaatgtcgatatacaattttcgttcctgctcagtacaggtatctgattgtaacagttgtaaaaaacctttcgttgaagttaatggattgcgaatttcatgagagatagacgctgccatttcaccaattaaatgaaacttttcagcatttataagttcgttttggagacgaacttgagtttgtaatatgtgcagtaaatataaaattagaatcgtaccaagcattgaacataactcatacacaataatatgcagtatataatcagtcttatttgtaacctttgaaaggaagaagggtatccaactaaatccgtatgtgagactgtagataatagcaagtgttatttttatacgattagaagtttgattaaaaaatttatatgttaatagtagaacaataaatagaagaacagaaccgataagagatgggaaaacacctaccccacctaataataagcgatatatgtttaatacaactaagatagaaccaccagcaataggccctcccgttaatgtaccgacaattaatacaatatggcgcatatcaaattgaaaaccattatttgtttttgctgcaaatgtaatacagagtacggtagcaaggcaacagagtacaatgaatatagctgaatttaatttaggagagcgtttccctttttgattccaaaataaatgatatacgagcattgtaatcaggatgaataatatatttaaaaagagataaataataaaggatttcagtgggatgcctcctctcttcttagattaaattaatcatactataaaatgaaagaaatgaaataataaatagcggaaaaatcagaaatttttacgctagtatacaatatgttacaataagctgtgtcaatgaaagaagaaattccgtgcatcgcgcgggagaggttcgcgaactccctctataaaaaactatggaaacaacaatatccttaggtattgttttgtttttttattgtgacagttcaagaacgttctttcttcttatttatagtagagaaggagaatgagtgaaatgaaaaaagaaaaagcagttgttgtttttagtggaggacaagatagtacgacatgtttattttgggcaatagagcagtttgcagaggtagaagctgtaacgtttaattacaatcaacgtcataagctagaaattgattgtgcagcggaaattgcaaaagaactaggaataaagcatacggtactagatatgagtctattaaatcaacttgctccaaatgcgttaaccagaacggatatggagattacacatgaagaaggtgaattgccatcgacatttgtagatggacgaaatttactcttcttatcatttgctgctgtattagcaaaacaagttggagcacgtcatattgtaacgggtgtatgtgaaactgatttcagtggttatccagactgccgtgacgtgtttgtgaaatcgttaaatgttactttaaatttatctatggattacccgtttgtcattcacacgccacttatgtggattgataaggctgaaacatggaaattatcagatgaacttggagcatttgagtttgttcgagaaaaaacattaacatgttataacggaatcattggtgatggttgcggtgaatgtccagcatgtcaacttcgtaaagcaggattagatacgtacctacaagaacgcgaaggagcgaataactaatggataacttttttggatttcgcatcgtagagaatttgcaaaaaatggacaaggatattcagcgtaaacaactcaaataccataataaaagagtaatggtcagcaaggaatttacatttgatgcagcacaccatttacactgttatgaagggaaatgtaaaaacttacacggtcacacatataaagttgtatttggaattagtggatatgtaaatgaaataggtcttgcaattgactttggagatataaaagaaatttggaaaaatgaaatcgaaatttatctagatcatcgttatttaaacgaaacgttacctgcaatgaatacgactgctgaaaatatggtcgtttggatttatgaaaagatggcagaagcactaacaaaagagaatcgagtgaacgaatataaaggagctcgcgttgaatttgttcgtctatttgagacgccgactagttatgcggaagtaagacgggagtggatgcttgatgagtaaaatccctgtcttagaaatattcggtccgactattcaaggtgaaggaatggttgtagggcaaaaaacaatgtttattcgtacagctggttgtgattatagctgtgcttggtgtgattctgcttttacgtgggatggatcagctaaagatcaaattagacagatgacaccagaagatatttgggatgagcttgttgcaattggaggagaaaatttttctcatgttacgatttcaggtggaaatccggcattgctgaaaaatattgagtttcttctttctatattaaaagaaaatggaatgcgaacggcaattgaaacgcaagggagtaaatggcaagattggttacttcaaattgatgaggtaacaatttctccaaaaccaccaagttcaacgatgaaaacagattttcataagttagatgctattattgagaaactagcaggaaaagatattagtttaaaagtagtagtattcgatgatcatgattttgaatatgcagttaagatgcacgaacgttatccaaaggtaccatttttcttacaagtaggaaacgatgatacaaaaacagtggatgatgcgatgcttataaaaaatttattagataagtatgaatggctgattgataaagctgtaaattgtaaagagatgaatgatgccaaagtattgcctcagcttcatgcgttagtatggggaaataagcgcggcgtataacgagaagggatgtttaaaatgacaggaagattagatgaagatttaaaagatgtaacattactagggaatcaaaatacaaaatatttatttgaatatagcccagaaatattagaggtatttgataataatcatccaaaccgtgattattttgtaaaattcaattgtcctgaatttacaagtttatgcccgaaaacaggacaaccagattttgcaacaatttatattagctatattccagagcaaaaaatggtagagagtaaatctttaaagttgtatttatttagtttccgcaatcatggtgatttccacgaagattgcatgaacgttattatgaacgatttaattaaattaatggatccgcgttatattgaggtatgggggaaattcacaccacgtggtggcatttcaattgatccatactgcaactacgggcgcccaggtacgaagtatgaacaaatggctgactaccgcatgatgaaccacgatctatatccggaaacaattgataatcgttaatagaaagaaagggcctgtatactatacaggccctttctttctattatattatgcattttgattaatgacagtatagtttttatgacttacaactgtaagaggttccatatctagttctctaaaattcttcataattgttatatcaacaataacagagttttgatttactttttgaacacggccttgcattccacctttaaattcgatgatatctccagtttctgcgatctgcataagcaactctccttgttacagttttcccaaaaaaagaataaatttgggtttttttatttcctcctattttgaaccatatttcctactttgtaaatgtttccaaagtaaaaattcgaaaaatattcactttttgtaagaaaatatgtagaaaatccatgttttttagaaaaaatagcaaaaatgcaagaatctttatatcgaggtataatgaaaaagtagaataacctgctgaagtgggagaaattagaggcggtaaaatgatgtttgaatttgtggggagtgttatagctttaattttatttttattttcttatatgcatttaaaaaagattcgtcaatatgatacgagtacatattttgatgggatggatggtatccatgcttcgataacacatgatagtggtggggagatgtaaaggtatataactttattttcttgcgtggtatgatgtttagaactagtgcataatagagttcataagtgatgaatggagagtgaaaagaatgaagatttcttttattcgtcatggttgtttaagtcgtataagagaaccgatgacaattaattcatttcacgaatggatgaaacagtatgattccgagtcaatgatacaaaaagctaaaatgccgatagaaacaatagaggcaattgaagcagcgaaatttgtcttaacaagtgatcaaaggcgtgctgtacaatcagcagctgaattgacggattctttatcttttatgcaaaattctctttttagagaagctgaagttccttcatgcttttttgctccgaagtggttgaaatgcacaattaaggtatggatgttcattggacgaacattatggatacttggctaccataaagatgttgagtcttataaggaagtaagagagagggtaaggcaagcggcttacctgttacatcgttatgctctcgtacatggaagtatagctcttgtaggtcataattatgtgaatgtaatgattggtgccgaactgagagcgatgggatggtctggttctcctattttgcacagagagccatggggatgtacaacatatacgtttcacgaggcgatggatggaaatatattaaatacaaatttaacataaaagcacacgatttatataaatcgtgtgctttctttttaagatatagaaattttgacgtttaatggttttacgagatgagcataaggttctcctactagcataacaatttcatcttttttataacctaacttttcgtatagtgaataggcgcgtttgttttctaaattaacaagtaaagcgatttttttatgccctttttcagttgcatagatttcggcagcttcaattaatttagaacctataccttttccgccgtgtgcacttgaaactgataatgtatcaatgtaatactcatcaagctcagcttctttttctaacgtaattgattcatctttatgtaatgctcttaagtgatgtacaattggtgcgtcaagctgtgttgcttcactaccgtgataagcgacaataattccaactgcactctcgtcttgttcatagacaaaacagttttcgtagctcagacggttattttcttttgagaaccatgtctcaagtcctagtaatacttctgcttcaactgtgctacctgtgattttttcagcaatttcatgcagagcattatacaataaaggagctattgccattgcatctgtcttttttgctttccgaatcatagtatccctcctagttctatttgtatattgtagcatagtggtatggaactttgcataattgaatgccgaaatgtttgatatagagaagtagctatgttagtatatgatatttagtggacatatagtaaaacaatattgtttgcgaaataacgaaaataaaatcatggcataacaacgagataaagtgaaacgttaatcagtaagattttttgttcattctacgactgattagtagtcaacaccaatcggactacctgcaaatagcgggataaatttacagttgttgacctatagaatataagataaaataaaatattgcagagaggtgaaatacatggataaagaattagcaaatacaattttagatcagctaaaaaatggtgaaataaaggagtatgttgttacgaaagatgtattttatacgttcagagaagttgttgtaaatagagaagactttaagcatttcattggtaacgcacagcgaggcgggcaagtgatttatacatattcagaaacgccacgttcataaaggagaattttgatcagcagggcatctctcactgattagtagccttcaccaaacggacgtttcatgcgggataaataaaagataaaggagaggggaattatgggcgattttaaacaaggcattttaccacattgggattatatgtggaaagatagagccggcaatcgatttatgggaatggttatgtatccagagaaacgaaaatgttcagcaaaaatgcttcagaaaataaaaagagcatatgaagaagcaatagaaattaaagtaactgtacaagttcaacatacatatcagtacgtagaaggactgattgtatactttgatgaagaggctcctgtatgtacaatgcttgataaagatgaaaatccacatcatatatttgtaaaagatattttgcgcattgagtactctgaataaacttttcataaataaattgaagttccataataataatctttttctataatagttatcttttagtatgtaacgaaaaacgaaagtatatgtataatatatttaataaggtaaatttgataaatgtaatcgttttttagagcagattatagtttcatatctgttcttttttgcgtgatgctggagaaatatatttcttcagcatctaccgttttatgacaaaatatattgttaacttttttaaaaataaggttaaattcgttgacaacttttttgaaaagcactttattgacatgagttttagaatgttgtttcatagtcattgtattgaaaaaaaacggctatcatgtcgaaaagtaaaagttaaaaaaagaaagaatttatacatatatcttgtgtcttattttgaaacgtaatacaatatatagagaaatcaagaacaacatatagagaatatagatttgagagggagggtcggaaatgttagttgcatatgattctatgacaggaaacgtgaagcgtttcattcacaaattaaatatgccggccgttcaaattgatgaagatctagtaatagatgaagactttattcttattacgtatacaacaggttttggaaatgtaccagaacgtgttttagactttttagagcgcaataatgaaaaattaaaaggcgtatctgcaagcggcaatcgtaactggggagacatgttcggtgcaagtgctgacaagatttctactaaatatgaagtgcctattgtatcaaaatttgagttatctggaacaaataacgatgtagaatattttaaggaaagggtgcgggagattgcgacacattgaactgaataatgaaatcacgcaaatgcaggacggtttttatcagcttcataaagataaagaggcattagaagtctttatggaagaagctagagagaataccgttccttttaatagcgtggcagagcgaatggagtatatgaaagaacatgattactattacaacgttctggacgagtatagcttggaggaagtagaggaagtatataacatcgcttatggtgaaaacttcgagttccaatcttatatggcagcatctaagttctacaaagattatgcgttaaaaacgaatgatcaaaaacaatacttagaaagctatgaagatcgtgtagcaattgtttcattatacttaggacgcggtgatgtttcgaaagcaagacaattcgcaagcatgattgtaaaacaaaactaccaaccagcgacaccaacctttttaaatgcgggaagaagcagaagaggagaaatggtgtcttgtttcttgttagagatggatgatagcttaaattcaattggctttaacattaatactgcgatgcaattatcaaaaatcggcgggggagtagctttaaacttatctaagctacgcgcacgtggtgagcaaattaaaggtatcgacaacgctgcaagtggcgtagtacctgttatgaaattgcttgaagattcgttttcatatgcgaatcagcttggccaacgaaaaggtgccggtgcagtatatttaaacattttccattgggatattattgaattccttgataccaaaaaaataaatgccgatgagaagagccgtattcagtctctatcaatcggaattatcgttccaagtaagttctttgagcttgctgagaaaaacgaacctttccatgttttcgcgccttatacggtttataaagaatatggcaagcatttagatgatattgacattgatgaaatgtacgatgaattaatgagcaatccgaaagtgaagaagaagccactagatattagtgcacgtgatatgcttattaaaatcgctatgattcagcttgagtctggttacccatacttaatgtttaaatcaaatgcaaataatcaacatccattgaaggatattggaactgtgaagatgtcgaacttatgtacagaaatcttccagcttcaagaaacttcagaaataaatgattacggtacagatgacattatccgtcgtgatattaactgtaacttaggatcgttaaatattgtaaacgtaatggaaaataaagaaattcgtgaagcagttcatgcgggaatggaagctttaacagctgtttctgatatgacgattattccgaatgcaccaactgtgaaaaaagcaaatgacgagcttcattcagttggacttggagcaatgaacttacacggatatttagcaaaaaataaaatcgcttatgaaagtgcagaagcgaaagaattcgctcgtacattctttatgatgttaaattactattctattgagaaaagtatggaaatcgctacagaaaaaggcgagacatttaaagacttcgataaatctgattatgcgaatggcacatacttcgaaaagtatgaaacgacagattacagtcctgtaactgaaaaagttcagcaactatttgaaggaattcatattccgacaaaagaagattggacaagtttaaaagagcaagtgcagaagaatggtttatacaactcatatcgtcttgccattgctccaacacaatcaatcagttacgttcaaaatgcaacttcaagcgtaatgccgatcgtaagtcaaatcgaatcaagaacatatgcgaatgcgacaacatattatccaatgccgtatttatcaaaagatacgttctggtactataaatcttcttacgatatgaatcagtttaaattaattgatttaatcgcagaaattcaagaacatattgaccaaggaattagtacaattctttacgttaatagtgatatttcaacacgtgaattagcacgttactacatctatgcacataaaaaaggcttaaagagtctgtattatacgagaacacgtaaattaagcgtggaagagtgtgtggcttgtaccgtttaatggcatattgccatactaaatgaataacccaatagtatgagcagggttatgaaccctgctcatacttggtttgttctactaaacggttagcttttcattgttagatggaaatttaaccgttcagtagaacaataatagatataggggtgattcaatgcgcgctgttaactggaataaaaaggaagatgatttcagtttaatgttttggaagcaaaacatcgctcagttttggacagaagaagaaatcgcggtttcgtctgacaaaaatacttgggtgcaattatcgaaagaagagcaaattgcttataagcgtgtattaggtggtttaacacttttagatacgaaacaaggtggcgaaggaatgccacttgtacttgttcatcttgaaaatttacaagcgaaaagtgtattagctttcatgggagctatggaagaagtacatgcgaaaagttatagtcacattttcacaacattagctacagaagaagaaattgatgatatttttgactgggtagacaatcatccgttacttgagaaaaaagctggtattattactagttactatcgtcgtttattaaagcctgaagtaacgaaaaaagagttatacatggcaatggtagcaagtgtgttcttagaaagttacttattctatagtggatttttctatccactttacttagctggtcaaggtaaactgacggcaagtggtgaaattattaaccttattatccgttaacttatggcggcttttggtagagataccaattgaaaaacccttttaattgctgggaccccctagtgtaaatttatctgtattattattgatgaatatatgcattcaggttattctctaactatcaatagatggaaaggagaatagctgatagggcaatcagcagcgaagcctttatctagcgataacatgtacggaagtatcagacatcgaaaactgtataaacagtggtgggtgcgatacgtagataaaggaacgttcaacgactatcccaatggcggtgaaattccgcaagaggagtagggccaagcggtgggtgagaatcccttaaatcgaaatggagggctacctgagaaggtagatgatatagtctcttcttacaggaaactgtaagctgtataaacggcataggagtagcgaacttatgtgaaggtaaaggatgagtcaattcacggcgtattcgtcggtattttagcacaacaaatcttcgcagaactttctgtagaagagcaacaagaagtgcaaaaagaaacacaagagttattaatggaactatatgaaattgaaatggcctatacagaagaaatttacacttctatcggtcttgtagaagatgtaaatcgtttcgttcgttacaatgcaaataaagggcttatgaacttaggacttgagccgaagtttgaagaagaagaaattaacccaatcgttttaaatggtttacgtacagatacgaaaaaccatgatttcttctctgtaaaaggaaatggttacgtaaaagcaacgaacgttgaaaagttagctgacgatgacttcgtgtttaacttttaatataggattataaggaaaagctgtcttattgattgataagacagcttttctttataattttgtttacataacactattatttttgtatagcgatttatatttgggaagttctattcggttaacggatagaacttttttgtaattaaatgggtatttacaaaccttttgtatcagtgtattatttaactagtacaccgatacaaaaggagggaagaaatgaaaatagagttttctccaaatacaccaatttacattcaggtaatggaatgcataaaaaaagagatcgtaacaggacatttattgcctggtgataaaattccctctgtccgtgaattagcgagtgaattacaagtgaatccaaatacgattcagcgtacatttcaagagctagaacgggatggagttgttgtcacacgtagaggaatgggacggtatgtaacgaatgaaggggagaaaattatggagctgcgaaaagagatggcgaaagaattacttcattcttttatagatggaatggacaatttaggtttttcagaagaagaaattcttacaattcttcgttcttcattacatgataagagggaggagagccaatgacagagctattgaaaatagaaaacttatggaagagatacggattaaaagcagtgatccgtgaattaaacatagagattacggaagggaaaatcgttgggcttgttggagataacgggagcgggaaaacgacgttattgaaaatgattgcaggcttgcaacacccttctgaaggtagtattacaatagacggtaaaaaggtaggattacagacgaaagaaatcgtttcatttatgtccgataagccagtctttgatgattggatgactgtaaaagatgctttatttttttaccgagatttttataaagacttcgatattcaaaaagcggtagatacgattgcagaatttaaaataccgttagaagaaaaaattacagcattgtcaaaaggtatgatagagaagctgcaaatcattttaacattttctcgaaaagcgaagctatacgtactggatgagccgttgggcgggatagatcctctttctagagaacatgtattggatttaattctacagttctatagggaagattgtacgatattaatttccactcacttaataaatgaaattgaaaatatttttgatgaagtgatctttttaaaagatggagaaatggttctatatgaaaatgtagaagaaattcgttttcagagaggaaaagcagttcatgaattgtttaaggaggtgtttagtaagtgaagtcagtactttcctatttatggaatgtaaataagaaaagatatattgttacttttttattctttgtgctaattgaagctgtgttattttcacaaatgattgtaagaaaaagtgatgcggctatcagtagacaagagggtatatttggaatcattatgattatatttttcttttatattgtttatatgtttatacaaacaatgaaatcatattcacgcttactaactaatccaatgttacgacttacagcaatatctgggaaacaatatgtaatttctatgcttattttctcatttatcgcaatggctatatggtatgggatatgtggaattcttttctacgtaagttatgtattagcttttcctacgacttctgtatatgtagaggcaaaagagattatgcaagtaggcataattaataatttaatatatacgataagcgatttatttgagtttttgtttagtgtgttacaaatcatattagtaattactctagttaagttacttaccaaaaagaaaaaggcgcaaaatatactgatcgttattatttttctagtaataaatatagcgattactttagcgacaaccttgctaggaaaattagctccagctttccaagtattgcgaagagtagaatatcatagtgaaagcaagagtctgtttattaatatgtttcaagaaaatggatttaacatttttaatataagtttcatggtaatggttagtgctctaataatatatgtaattgcttatattatcgataaaaaactagaagtctaaaggaggaatcagcattgggaaacgtagtagtaaagttagagaatgttcgaaaaaggattggtggaacggaaattattcgtggtttatcatttgaggttcgtgaaggagaagtatacggattccttgggccgaacggtagcggtaagacgacgacgatccgtatgatgacaggtcttatttcaatgacagagggcgatattacaatttgtggacatagtattcgctcggagcgtgaaaaggcactagagcaaattggagcgattgtagaaaatcctgaactatatgattatatgacaggaatgcaaaacttaaagcattttgcgaatatggccattacaccaattagtaaagagcgcattgctgagattgtaaagcttgttgaattagagcatgcgattcataaaaaggtgaaaacatattcacttggtatgaaacaacgtttaggaattgcacaggcattacttcatcagccgaaaatcttaattttagatgagccgacaaatggattagatccagctggtattcgccaaattcgtgattatttacaacgtttagcgaaagaagagaatattgctgtaatcgtatcaagtcacttattgagtgaaattgaattaatgtgtgatcgcgttgttattattaaacaaggtgagtttgtacaagagtacaacttacatgaaaaagtgaaacatgatgaggcagtcgttgtagcgtttgaagtagatgaagttcagaaagcaaatgaaatcattaaaggcaaagcaaaagggaatgtaattgtagcatctgtaacaaaagacaacattccgcaacttgtaaaaaaacttgttcatgctgatgtgcttgtatatggcgttactgttcaaaataaaactttagaggatgagttcttagcgattactgggggagtgaaagcgtaatgtttaaattaattcaaaatgaatttttaaagttgcatgcgaaaaaaggtatgtatattttaattggtgtcattgcggcactcgaaattttaggtactttagcaatgttgaagtggggaaaaggtgatgagtttaagggggcatatttagattatgcaaactcagagattggcttaattgttttatttacaacgatttttgggattacacttgctgcccgtactcttactgatgagttccaaaaaggtacaattaaacaattgttaatccgtccaagaaaaagacttgcagttttattttctaaatatattacagtgttattagcaatgttatttatcgtattagctggtatgctaattgcaatgattattggcggtattgtaatggatggtagtaaaacagaattaacgttaggaatcgtaatgaagtcaactttatatcaactactttcaccgttcttttttgcaacacttgcatttttcctagcaaatgtctttagaaaatctgtattaccattaattattacgatgttcctattcttcttacaaggtgcaattaatatggtattaataatgtttgcaaaaggtgtagcgaagtttgtagtattcaaccatttggatttaagagcttacgatagtaataaattaatcaatggtggaatggaaccaacatttacagaatttacgtttacaacttcattattacttgtagttgcatactttgttgtgttacttgtagcatcaagtgcattattccaaaaacgtgacgtattataataaaagaaatccccgcttgtaaaaacggggatttttattacataaaattcacttagattgcaacaagtatgcaatttttcggtggagaagaaagtggtacaatctcaattactgaattacaagcgcaaagtaatttatggattggtattggtcttacagttgttggattactttggttaattccttatgtttggaaacaatggcgtacagtaaaagaagttggcgtgccacgagtacgttttataaatgagcaaaaagtagtgagttcatcacaagaaaatgaagtgtatagtcaagtgatcgtaaccgatagattgatggccatagagttaccagatgaggctgtaaataagcttcggttagaagaaaatgattatgtaacagtatctgtagaagaagataaaatcgttataaagaaagcacataatagataattaaaaagtagctccttaggagctactttttaatttgtaataatttctacacgaaaattattaccgttctttacatatttaatatctgtaacagtgcggaccgtctttaaaatctccactttttcaccaattcgtgggatggtcggaacattgtcccaaataccaagcaagtcatctaattgtgccgttttttcataaaaccagattttcaatgtaaagcccctttctcgaactttatgtattttaatacataatatattatttttattcttattgtaaggggtttttttatattttatgaataaaaataaattaatcttctgggaagatatgttcaatatcaggagtaagagatacttctgataatacgatatgagaaacggtcgttgcatatgaagaaacatcattgataaattcttccagttcaacgagtgaaggaacagaaatttttacaatgtagcataagcttcctgttactcggtaacaaaaacttgcagatggataagattgaataaactgttgcatacgtgttgtatcaccattttttaaagtgatttctaaaatacaatctaaaacgagtcctgcttttttataatcaatatcgattgtgtatttttgaataacaccttcgctttcgagcttacgaacacgttctgaagtagatggagcagataagtttactcgtttcgccaattcacgcatcgaaaggcgactatcattatataattcatttaaaatttttcgatcaacacggtctaattgcatttgtaaatatacctccagtaaaataatgatttttgtaaagggaaaatataaattaagattcatatgaaatgtaaagtgaacgttatttattttacaataaaacagaaggaaataggaggggaaatgatggagagaatttcattatcaaatgtaggagatacaaagtttcaaaagttattagggcataattcggatatattacattcgtggagtacgttagaagatacactgtacaataaaggaactctttcagcagagttgaaggagcaagtgagaagaacattagcgtatgggaatgaatgtccgtactgtatggcaaaaggaagacctgatgatatgcaaaaggcagaggagattggtgtagccgttacttttgcgcatacatttgttcatgaccgaaaagcaatagatgatactatgtttcacgtattaaaacaatattggacagaaaaagaaattgtagagctttgcgcctatgtttgctttattactgcgtcacaacaacttggttttctatttcaattacagccaaattaagggggaaatgatgacaaatcaaatagcacttatcataatcgatgtacaaaaggcatttcaattaccagattggggcgagagaaataatatttttgctgaagaaaacatgagaattttgttagaagaatggagaaaaaggaaacgaccagtttttcatattcagcatgtaaataaagaaaatgctcagtcaatgttttatgagagagcggaaacggtaaactttaaagaagaagtgcaaccactacttggtgaagtggttattcagaaattcgttaacagcgcgttcattgggacaaatttagaagagcaattaagaaagaacaaatgtaatgcagtagtggttgtaggattaacgacaaatcattgcgtggaaactacaacacgaatggcagggaatttaggatttacaacatatttagtgagtgatgcaacggctacttttaaccgtaaaggtttagatggtaaggagtatagtgcagaagatattcacaatatgacacttgtaaatttacatgaagagtttgctacgattgtgacgacaaaagaagtattaaaattattttaagaaaataattgcaaattatgtagaaaaaaataagaatatttcgtataatctaagtacaatcattttgaaaataggggtggcatcatatggagcaaatttcagtaaagaaattagaagaggtacttgttgtagcaggggatgataaacagaagcaaaaggaattttatgaattgctcttatttactgagttttatgttgctggttcactagaagcagaggacggggcaacagagggaatacttcgtttgcgtcatttccaaggagaaggtagatggatcgttccgttctttacacaaatggaatttgtaaaagatgtgttgccagaaggaacgccccttattacgatacgtgggaaagagttatttggtagcattgagaaagatgctacagctgtattaaatgttggtactgatataagtaaaacatttattccagaagaaattgcagatatctcatctggacgaatttttaattattataagtaaaaggaaaagcgtaatcgcttttcctttttaatttgaatatggagtggctataccggaagaaatagagactgttttattattcgtgtttattgtcgctgtagctccaagtggaataccgatgtttggacttatatgtccaattggtaaaccgaataggaccggtatatgatatggtgcgaaatattcatataatattgcttgcaatgattgagatggctttgaaggagtgcagtcgtgacaacttgtgaaaataacgcccctacattcattaaactttccagataaaagtagctgatttaacatacggtcaatgcggtacggttcttcaccaatgtcttcaagtaataaaagtgtattgtccgtatttatctcgtagggcgagccaattatacttgttaacacagctaaatttcctccaactaacgtacctgtaactgtactgtgagagctagatacgatacattctgatgcagataaaatggttgaatacggatggaatagctgattgaaagaggataaagatagggaatcaataccttttcctagttcttcaatcatcggaccatgaaatgttataagctttgcataacgtgaaacagcagtatgtaaagctgtaatatcgctatatccccaaaagattttagggttttgccgaatgatttcatattgaatgtgagggaggagacgagcacttccgtaaccacctcgtgcacagaaaacggccttcacttcattatttgtaaatgcttcatgtatatcgtcaagccgaacttgatcacttccggctaaaaatccatatttctcgtaaacgctcttcccgattattacggataaccccatctcttgtaatacattcacaccttgtaatacattttcgattgtaggtggaccagatggtgcaatgatcattactgtatcaccttgttttaatgcatttggataaatcattaagctcagcctccttctctttcaatatattcgcttcatatgaagttcaacccttgcaaaagcaggggaaagcttatcaaataaagaagatataaaggaaataggaggggaaatgatgtttacaagtcgagtaacagacatattaaaaattgagtatcccgttgttcaagccggtatggcaggcgcgattacgacgccagaacttgttgcagcagtaagtaatagcggaggattagggacgcttggagcgggctatatgagcccagaacaaattcgtgaagcgatttatagaataagagaactaacagataagcctttcagtgttaatttacttgtaacgaaagagatacaaatagaagaagagaaggtaaatgaggcgaaagtattactaagtggagtaaatagagaattaggtatagaagtagaagggacgttaaaacttccaaaaagctataaggaacaattacaagtgttattagatgaaaaagtaccggtcgttagttttgcatttcaaacgttagaaaaagaagaaataaatgatttaaaaagaagtggaataaaagttatcggaacagctacccatgtgaaggaagcgaaagtacttgccgagttaggagtagatattattgtcgggcaaggaagcgaagccggagggcatagaggaacgtttattgggaaagaacgagatgctatgatcggtacttttgcgttaatacctcagttagtaggggctattccgcatatcccaattgtcgcagcaggtggtgtaatgaacggacaagggcttgttgcggcattggcactaggagcagaaggtgttcaaatgggatcggcctttttaacaagtgaagagagtattacgcacgatgtgtataaagaagcggttttacatagtacagatacgagcacaactgtaactcgtgcgttttctgggaaatatgcgcggggtattcggaatgaatttatagagagacatgaaggaaaagaagaagggctgccgatgtatccagtgcaaaacgtattaacttctaaaatacgccaagaggcagcgaagcaaaataaggaagaatatatgtcactttgggcaggacaggcagcatcattagctagaatcgaatcagctcagcatgtagtggagcgagttatgaaagaagcagagaatgcaatcgaacaattacaaaatatatacaaaaagaccacttgagtaattcaagcggtcttttcattagtttgctttataaaattgttggatggcttcgtcgatgtaaacccagcctttccaacctaagtgcatatgatcttttaagaagtatttatcgtattcatgatttgagaagtcggcaattggataaccagctttttcaatttgctcatgaactttcttatagtatgcttcgcggcgttctttcgggaagccagcgtagtcgtaccaaggacctttgacaggaacagaaatgaagagtggttttgcaccagattgttttaataaatcaagtacaatttgtaaatcttcatattctggcgattgatcataagcatcattttttaagtagccttcacgttgctttaatttcttcttgattttgctattgaagtaaccatcttcgataccatattcattagatccagattctgctgcacctgtttgatctgcatgtttacgagcttcatcccagttcatttgttttaatgaagggtcaagcttttctttatgcggtttaatattaaacatagctgtaaataaatctttacgatctaaaatgttacggtaaatataagcgaaaggtttagcagcaagtgcttttactttatacttcgtatcatcataagcgatgccttcaagcgagatttttaataaagtttctttttttacaatctcaaagtttaataaacgctttgcaatttgttttttcatttcaggttttaaatcattgttgaaaatgaagtggtaaccttgttgttttgaaaagttaggtgcaaagtgcgtttcatcaataccttgtggtacaaaccattgcggagaaagaacgaataccattttcttatctttcaattgatccattgtagatgcgaagtttaacacatgtacaaggtcttgtgttccgccgcgtccaagaaggaatggcgtaaatccttcaggctttactttaaaataattagatggatggaaagcatccatacgtgcgaattccgatgaaccgtacatcggaagatattttggatctgctaacatcttttgctgtaaaatcatactttgaattttttcttcttttaaagaagtagcagcttgttctactttttcatcacttaaaagtggaagtaggaagcgcgttggaataagtaagaatacagcaaaaagggccaatgctaaaagcatcggaccaaattttgctttgttcatcggatttcttccaactttttaataaccatgtttggtgtagcccactcgtcacggtcaaaatcagaaatagaaacttcaatatctaaacgctcttggaattcaactaataaagatactacagcaaaagaatcaagaataccttcttcaaataattgaacatctaagttttctttcacaatatcgttttcacatacttcttctaaaatatctaatacttgctctttgaattctgccatttttaaaatctcctttatatccgaaatatattatatgtgcaacttcttaatggaataagaagggtgcattaaaagtatctgttaaggtgtccagagaagattaggaaaccgaaacatacaatgtggaacgtaattacaatcgcaaggatgcgtgtgaatttattgtttggccaaaatttatgcttcttgttttttcgttcgaaaatatcgaataaaataaacagtgcggcatgatatagaccataaataatatactgcgcaacagcgcttccttggatatgccaaattcccataatgaagaagtttaaaaatgcaccgatatacgaaattgtgtaacggttcttaattaactttttcttcgttgcaaaaaatacgaaacgcatgtagatgaagtcacggaaccagaatgataaactcatgtgccagcggttccagaagtctttaatattacgactaaggaatggcttattaaagttttctggcgttttaattcccatcatataacttacaccaattacaaaagagctataaccagcaaaatcaaagaatagatataagctatagctatacatgtaaatcatatttgaaaagattgtatcgtgttgagcgaatgctggatccatacaatattgctttattaagtaagcaataataaatttatacaagaaaccttggaaaatacgatttagtcctgtatatagtaaattttgatattcttcagcgctaggtggcttttgaatatctttttggaatctacggtaacgatcgataggtcctgttgaaatcgcagggaaaaataaaacgaattcccagaagttaaagaaagaaagctctttaattaaaccatcacgaacttcaaataccatttgaactgctctgaatgttacgtaagatatacctagaaaaacaacaagttttaactcaggtagtaacgatgcaaatggtgcgatttttgccaaaataagaggcaaaatcgataaaataacagctatgcaaaatgtgaatgtactattatttttttttcttaaaattaaatagcctttaattagggcatattgccaaataataaatgcggctaacatcattgcttgctttggtttatctgagaagataatagcaagcatgattaatgttaaaacggcattatatttacgcaacattttaccttttaatccagctatgatagtaggtattaataaaatgcccactatagcgaaaaaataaaatgatccatatgcggtcatgctgtaacctcactcaataattttttgcgatctacctttccatttggtgtcattggaatagaagattgatacatgaatttacgtggaatcatgtagtttggtaatcgctcattgagttcttttttgattgcagatgttaatttgaattctttttcaaacgaatgctccccaggaacaacaaccgctaataaataatcgtatttctcaccttttttaattggaacgataactgctccttctacgtaagaacacgcacgaaggtgatgctcaatttcttctaattccattcgataaccatgcaacttaatttggaaatcaagacgaccattatagaatagaagaccattttcaacatagccagcatcgcctgttttataggcgcgctcaccgtcaatcatagtaaatgctttttctgttaattcagggcttcctaaatatccaacgcttacgcttggaccgacaattacgatttcacctttttcaccatcaggtgcaatcgtgccatcttctttcataataagaaggcgacagtctgatttacaatagccaactggaagtgatttgtattgattaagcacttcttctgtaacgtgaatacctgttacagcgacagtagcttctgttggaccgtaagtattcataattgttgcttttgggaaacgctcaattaattttctagccacttcatttggtaacacttcaccgcagaataagaatgttttcatgttcggtagcatactttcagagaaggatgcttccattaaacacatttcagcgaaagaaggtgtcgaagtccatacttgaatatccgattgctctaaagaagcaaacaagtcttttggacgcgcaatcatatctttatcgattgcccaaagtgtaccacctgttactaatgatgggtaaatatccattacagataaatcgaatgagaaaggtgcttgatttaagaatacttgccctgtttgtaagttgaaatcttctacagcccattttgtaaagctaacaaggcagttataagtaatctgaacccctttcggattacctgtgcttcctgatgtgtaaataatgtagaagttctcatcaccttttaccgcatgttcaggatttggagtgttccctttatgagtaaagaaaatatcttttaagttgtcttcacttacgatgcgaactggtaaatcagttacagttactgctgttgccgataaaagtaatttcgcaccagaattttcagcaatacgttgtacacgatcagctgggatagataaatctacaggaatgtaagcatgtccagcttttacacatcctaaaaagttaacaatcatttcaggttgcatatggccatacaccataattggtgaacgatcgtctggatactcagaagaaatccaatgtgctaacgcatcagaatcttcctttaattgtttgtacgtaattttcgcatctcgccaaacaaaagcggtttgatcaggcgtttctgcagcccacttttcaatttgttctaataacttcataacgttcccaccctagaattcattgtaaataaatgtacttgtgtttgtatcatggaatccatacaaccaaagtaatgcaaataaaattgcaagataataaaccgtctttgcaacccattgtgtgagtggtcgagaccatatctcttttaatctttccatgtctttccctctcttaatgaaataatagctctttgtaggtatcatgtcctacattattgtgaaaaaaacaaaatcccacattttaggtaaaaataagtcaaaaggctcttttttgatattagcactaaatactaaaaaagaaaatccctaacttagcaattatattacattcagcatgaatttgtaatgggtttgacatgtaaatagaaagtggattgtgtgaatacataaaagtggactataagaatacgtaaaaatacagtatttgtttttattaatcattcaagacggagtaaacttttaaatttctagttcttttgaaaaggaggaaattatcatgaatagagtgtggaagaatctaatttcggaagaaaatatcgtgaaatggagaaggcacttccataagtatccggaattatcatttcatgaaaaagaaacttcgcaatttatatatgatacattatgctcattttcttcttttgaagtaacgagaccgacgaagtatagtgtactagcaattaaaagaggtgtgaagcaagggaaagtaattgcgattcgagctgatatagatgctttgccaattcaagaggagacaagtaaatcttatacatctgtgaataaaggaatgatgcatgcatgtgggcacgatgctcacacagctattttattaagcacagcagaggtgctatcaaatataaaggaagattttgcaggtgagattcgtctattctttcagcacgcagaagaggtgtatcccggtgggggacaagaaatggttgaggcaggtgtaatggacggtgttgattatgtaataggtttacatgttatgtctggattagaaagcggaaagataggaattgtgtatgggccgatgatggcggcaccagacgtatttacagttgaaattcaaggcaaaggaggacatgcggcgcgaccagaagaaacgatagaccctattgctatcggagcacagattattacaaatttacaacatatcgtatcaagaaatacgagtgcttttatgcaaagggttatttcagttacacaatttcatgggggaacggctgacaatattattcctagtacagcaactttaatgggaaccgttcgttcatttaatcaagcattgagggtggaagcagaagggaaaatcgagaaaattgtgaaaggaattacagaagcacatggaggatcgtatacatatacgtatcgatatggatatgatccggttattaatgatgaatatattacgaaaatagtagaagaaagtgcactacatttgtttgggaatgagcgtgttgtgaagcttgaaccttctatgggtggggaagatttttcagcatatttaagaaaagcacccggttgtttcattaaattaggaacaggtaatgaaaatatatatacttgttatccacatcatcatccgaaatttgacgtggatgaatcagcattaatttgtggagtggagctatttttagagacgactataagattactaaaatcatagaaaaacaaaaaaaggcaactgcactctattgcagttgcttttatttctttccgtcagagagggctgagaaagaactatgctcattcatagtatatgaatagctaacggacaagcttgtacattttaatcatttttttaaaaatagttgttgacactgataatcaatgtcaattaatctaaaagtagttgaaattgataattattatcaataggatggatgcgacatgttaatgagaaaaaattttcaccttctgcggaggggattaaaagataaaaataaaaataaagatgttgatcagcatatggaatggcaaagaaatgtaattcggtctgaatatgtagatgagaagaagagcattcaaacagaaaaagagatacaaagtaaagggagaggttcagttgagtaagttagtaatgatttttgcaagtatgagtggaaatacagaggaaatggctgaccacattgccggcgtaattcgtgaaacagaaaatgaaattgaagttattgatattatggattcaccagaagcttctatattagaacagtatgatggaattattttaggtgcatatacttggggagatggtgatcttcctgatgatttcttagatttttatgatgcaatggattctattgatttaactgggaaaaaagcggcagtattcggatcgtgtgattcagcttatccgaaatacggagtggcagttgacattttaatagaaaagctacaagagcgcggggcagcagttgtgttagaaggactaaaagtagaattaacgccagaagatgaagatgtagaaaaatgtttacagtttggagctgaatttgtaaaacacctttcttaatggcagaagggagatgaagagcaagtgcatgagaaaatctcaatcaaaacgatgacagattatcatttgtatgattttatgcgttgtccgcataaattttattttcgtcatataaaaagaagagaaccttcttcatttgaatggcaacaaatagcacaaatgattgtcaatcaaattattaacgagtattacacgctacctgcgggtcaacaaacgaaaattgtacttttaatattaatagaaaagtattggaaaaaagtaaggattaatatgtttgcttcgaagacggagtactatattgtattagctaagctaacggatcacttattacagtttgttgaaaaggatgatagtcagacaccaccattgtttttatacgagaagtttcaaacatatatggaagagttaggtgtccacatgtcattgacatttgaagttggtgagtggagtgctgggtcgtttgtaattaaaaagtatgtcgtcgatgcggatgaggaaatgcttgctctttgtcagaagctaatgacagtatttagttataaagctttcggcgttcttccaggaaagattgaagttattaatttaatagaaggaactaagtatgagtacattccaaaacaggaagatattataactggaatggctgatttatctagaatgaaagaaatgttgcaacaacctgagcattatacagagcgtcattttcgttctgagtgtataagttgtgcatttcgtagtgaatgccaaggggaagaagtaaagaaagaagcggagcagaagaaaaatatcgtacattaaaggatgcaactttgcatccttttttgttgttgacatgaaaagcttttcatcatttaccgtatatttatagcagattttaataaagtgaatctttaatcagtgggggttttgtcaatcccccactgattatcagccctcattaatcgggctacccgcgaatagcaggataaagggaggaataatcaatgaaagatgaaacgaaagtatttcaatggttaaaagaacaaaatgctccttttgaaattcaactgcaaattttacaggcatttcaattgtataaagtcattgttgaaatggataaaaagttaatgttgtatgaggagagagtatatagggagagaatgtaatctcatccctgtaatatcgtttttagctgttctgtgcctgtaatgaattcgagtttattctctgactcaaagttataaataatattatgtagtaaaggactgtattgatagaagatagtaatgcgatgaatgagtaatggatcatgatgagaaataagtgtactgtactgttcatatacagatgtagtaaactcatgtccgaaatcataatatagtcctgcaaaatcaaaagcaggatcgccaatttgcgcatcaccaaaatcgataacacctgaaatacttttgttatgcttgttaaataaaatgtgatgatgagtaaaatcagtgtgaatgattgtgttttgaaaagtggatatagctaaacatgcaaagaaattttcaaataagcgatttaaggctagtttctgtaatgaagtaaggctagtagtgagatattggtttaattttgtttgtagctctttccagtaggtacatgttttttcaatagggaaacatagcgttgtaacttggtgtaaaggaatgctatgtagtaccgcaaggaaagtagctaattgtgtaataattgctttcagctctggatcctccagcgtggcaactgtgtctgtttttaatggttcaccatgaatgagagtatagtaactacaaagaggaacctcatcagattcatttttataaattaggtgatattgtggaacttcgatttcttgtagtgattgagtgagaattgcgcatagttctttttctaacggaattcgcatcgcatattcctgttttcgcgggaaacgaaacaatagctcatcatttactataactgctacattatcccatccttcttcattttgtttatatgaatgtatagaaagattaggcaaagcttcttttatataatgtttgtaagagtccataattgttcctcgtttctaagttaagttattccactttatgatatcagaattttctttctatatgttaaaatatagctatcattattaagaagggcgggagtattacgaaaaaaagactgttaatcagttctctatgtatcgcttttatattgttatggtcatataaagaggaggtttttgctacctttaaaccgattgatcagtacgagttaaataaggagttaaagaacaaaagtatagaaaatttaactcataatgaaatgaaaaaggtaggagagcattttgtgaccgagcaactatcagtgtttgggtctactaataaagaagatgtgaaacgaaaaggtgaagaactatttttaaatagagggtatgaacaattaatgggaaattattatccaaatcgttttcgagatttagagtataaatttacaaacgaggagatacgtgaagagaccgatgagagttttctttatcaagctgtagcgtacgttgcgggtactgaaaatggtaagagaagcgaaatgaaattgaattatgaagtgaaaattgtaaaggttaataatatatttatggtgctagaacaaaagcagcgcgtacaataaaggaaattcattgctcaatagaacattttggggtgtgtactacttaatgcggaataaaaaggccctcaaggaataaagggcctttaaagattttcattttgttgaccaagttctttttgagcaatatataaatttccttgctcgacttgtttaagggtatgaacagaatctcctgcatatcctttttgtgttttaacagttctttttgaacgattggaatcttgtttcttcatataataggccacctttcatcaaaaataaacgaaaatgataagtatgagtaatacagcagcgaaaatggtaatgcccattaaaaacgaagtgtttttatatttaggtggcttatgtacatcttgccgatatccaggtgaaatttcaggggcaaattcttcatcgaatgattgctttttttctttgtcgtccatatgtacccaccttcctttttcattatattatacgttacaagaaaaaatatgcataaagaaaacagccgctttattattagcggctgttttgtgttgtatattttcgttgtacttgaaagagacggataagtaggaaggcagcgccaaatgctagaccgataataagaccgatccaatagccttttgcggcccattctgtatacgttgctaatatataacctagtggtagacctattatccaataagcaattaaagtcataattagagcgacatttacatctttataaccacgcagagctccttgtacaggggttgcaattgcatctgaaatttgaaataaaatcgcaaagataagaaattcttttgctaaatgatgaacttttgcatctgtcgtataaatagaagcaatttgatcatcaaagaagtagagaagaatcgaatataataaagcaaaggtaagggctaatccaattccaatcagtccgtattgttttgcattatcgaaacgttttgcaccaacttcgaatccgaccgcaatagtcattgccattgctaaacttagcggagtcatatataacaaggaagcaaagttcatagctgcttggtgagctgcaatagttgtcgtactaaaattactcatcataagcgttaccgcagcgaaaatactcatttcaaaaaagatagcaaatcctatagggacgccaagctttaagaatgctgtccaactcgaaagagaagggcggtataattgtttgaaaatgttgaaagaggcaaaaggctctttcgtctgaataataatgactgtaataattaaaatgcaccaatatgttgcagtggaagcaattgccgctccaacaccaccaagttttgggaaaccgaagttaccaaagattaataagtaatttaatattacgttaattggtaatgatagtaatgtaataatcatcgttgttcgagtttttcctaatgcatcaataaatccacgtaaaaccgtgtaagtgaataaaggtataattcctattgcgataatacttaaaaattgagctgcaatacgttccacaggttcttctaagcgcatgccgtttaaaataggtgaaacgacgaagaaaccgatgaggataacaacgaaactagcacaaattgctaaataaactgcttgtatgacaacgtggggaacgtcctcttttttcttggatccaacgagctgtgcaacaatgggagtcgtggccattaaaattcctgttaacccagtactaactggaatccatatacttgttccaattgcgacacctgctaaatcagttgggcttgcatgtcctgacattgttgtatcgaaaaagctcatcgcaaataatgacatttgcgttacgaaaatcggaaaaaatagtaatacaaattgctttaacttttgtgagaatgaagtagtttctttcataaaatcccctttccgtataaaaaaacaaactcttactatcatacaatttaatcaaagattagaaaagaaatacgcgcctacaacatatgaagccaataaaaaaaggatgcactttgaaaagggataaggtattatgataaggtgtgaaaaaattacatattatttgttattaaggaggcactacttgtggctgattggttaattggtttaatcatgggtgctgttgaagggttaacagagtttctaccagtatcatcaacaggacatatgattttaacaggacatttaattggatttgaagacgagagagcaaaagtttttgaagttgtaatccaattgggatcgattttagcggttgtagttgtattttggaaacgattatggtcgttagttggaattgggaaagtaaaagaagggccatcgttaaatttattacatattattattgggatgattcctgccggggtactcggtgtattattccatagtgcaattaaaaaggttttatttggtccaggaccagttgtcattagtttagtagctggtggtattttaatgattgttgctgagaagttttcaaaaccaagtacagcaagaacgttagatgaaatcacatataagcaagcatttacaattggaatgttccaatgtttagcactttggccaggattttctcgttctggttctacaataagtggtggtttattagctcgcgtgtcgcatacagcggcagctgaatatacgttcattttagcagtaccgatgatggtagctgcaactggattagatttaattaaaagctggcatgtattaagctcggcagatgtaacgctatttgcaacaggatttgtaactgcattcgttgttgcgatgcttgcaattgtctcattcttaaaattattagctcgtgtaaaactaacaccgttcgcttattatcgtttcattttagctgcggtattctatttcttcattatgtaaaataaaaacctgccgagctcggcaggtttttattttactaatttttctatcatgttttccattacatgttcccaaagagaagtatcatcagctaatgtagcacggaaattagcatacatttctttttgtgtttcttcaaatgttggatcttctttttcaggtaatgtagcgcgcattgaagttactaattcttgtacttttggagcgcgtggtccaaagacggcttgttcatttccatctttatcaatgaaaataaagattggaatcgcacgtgctgttccatttgttaaatattgatccattaattctaagttttcatcgcgaattaataaacgcatatcaatatttgcaacttcagaaattcgtttcataacaggtacgcataaaagagcatcgccacaccaatcagcagttaatacgataacacgccagccatcattttgacgttcttctaatacaggaagtaattcatttggaattaaaaaattattgtaaatgtgtagtagctcgtattggtttacttgcatttcattcacatatgtatcaaaggacatacctttatcagcccattgttgtaagttcataattaacacctctttagtaagatttgctttcattgtaccaatttttatatagaaaagcttgtattcttactctttcttgtcacttaataattattattttatctttttggctgagatttgagaacctctcctcctcacgcattaaaatccccctttttctggaagttgacttcattttatcatgaaatacatattaaaaaactacgaattatgggaaaataagatgacaaaaagtaagatttcatgtaaaattattaataaggtttttatttaactaaatgaaataaaaggagctgtcaatgttgtctcaaaatcgagagcaattaatggaagaactatcgacaaatgtgtttgctatgtttcgcacattgcgtaatgatatcggaaaaatattcggtggttacataccgtggaatgaattcatcgttctgagaatattaaatcgtacgaataaagaaatggtatcgcgtgtagcaaatgaattaaatgtgtcgaatagtcatattacagctgttacagaaaaattaattaataaaggttttgtaactcgttcacgttctacatcagatcgccgagttgtgtatttagagattacagaacaagggaaagatttagttgcgaaaatggaagatgcgaaaaaacaatacttacaagaaagattctctgcactttcagaagatgaaatgaatgtaatgatttcaatttccaaaaaacttatttaagtgattataaataagaaaacgcttacgtgatgaaatagaaggtcttccttatatatgggaggtcttctttcgtgtgtaatagatgttaaaaaataaaatgtgtatgaaaaaagatagagcgccatactactaatacaaggaagggagggagaaatatgacgaatcgtaacggtagtaaagggagcggtaatcaaggatcaccaaagtccggccagtttaatcaggaatttagcactgaatttgaaactggtaatgataataaagggaaagaatatcgttctaaaaaagggagtaaatcaaaaaaggagtgaattaattcactccttttttgatttacgatgctgccgattgatccgtattatatttttcttctgattttgcgacaatcattgcgcaaattgcatcgccagaaatgtttacagctgttctagacatatctagaatacggtcaataccgataattaaagcgataccttctactggtagatttacttgatttaaaaccattgtaagcattacaagtccaacaccaggtacaccagcagtaccgatactagcgagtacagcagttaatacgaccatagctaattgcggtaatgtaagttcaactccgtatacttgagcgataaatacagtggctactccttgcataatggcagtaccatccatattaatagttgcccctagtggttgtacaaatgagcttatcgcttttggaacgccaagcttatcttgtgctgttttcattgcaaatggaagcgatgcattagagctagatgtactaaatccaattgccattactggcccgaaatgtttaaagaaacgaacaatactttcttttgctaatatctttaataagccaccatatacaaagaccccgtgaataatgagtactaacataacgacaatcatatacttgaacatcgcagcgacgcctgcaagccccattttaccaacggatgaagcgagcaaaccgaatgttccaattggggctaatttcataacgagattaacaagatacatcattaattcgttgccctgttcaagtaatgaatggataccttgaactcgttttcctaaaatagctataccgagtccaatcaatacggcaaaggcaatgatttgtaacatgtttccgtcagccatcgcttttgctgggttatctggtacgatatttagcaatgtgtcaacgaaagatgtttcagtttttgcaccttcatacttaagaccttctgttttaaaattaccgccagctcctggttttataataagtgcaaatgtaaccgctatagagatggcaaccgcagttgttacgagaaagaatgaaattgattttaaaccgattcttccaagttgtttcggatctccaaggccggcagcaccaagtacgatagaaataaacacaacaggaacaactagcattttaataagtcgaataaataattgaccaattgggttgaacacatattgatttagtggctcaaagatagatggagcagctaaatttagagtgagtccaacaactagacctagaaataatgcgattaagattgcttttgtttgtttcaataaaatcccccttttgtttttgcgaaatttctttctaaagcaattataccgaaaaaatccctaatttaacaatattttctgaatttttggtttttaggtgtagatagactgattttgtgtttggaaaataaaatagaccatcacataggatggtctagggaaggggacaatttatgtcaatttaattagggatggaagttgctttaagacactggggaatgtcttataaattagggaggaacaacttcaatacaataccctagaggctgcctaatgaaacgacctgtctaactttcgggggtcacttcaattttattccatcgctaaaaaggccttttctattttggctaaaaacttagcactcttctggcttaccagcattcgatgctgtacggaaagatgatccacatccgcatgatgcgatcgcgtttggattgtcgattgtgaatccgccgccaagcatagattgtttatagtcaatttttactcctttaacaattggagcactttctgtatcgataacaaattcaacaccgaaaaactcaagaactgtgtcgtcttcttttggttctacttcaaatcctaagccgtaagaaagaccgctacatccgccgccgtgtacagcaaggcgcacatacttctctccatcttcagcatcttttaacatatctttaatttgaaaagctgcttgttctgttacttcaatcatgaaatacaccttcctttctgttcttagtccattatacatctttacgcttctatcttgtactcatacactccgcggcaaattacttccgcaggtcctttcatcaacacgtttccttcttcagtccacgcaatcattaaatcgccgccagctaaatggactgtaatttccttaccacgttccatctttccatttaaaatagcagctacaactgcagcgcacgctcctgttccgcaagcttgcgttacaccagatccacgttcccaaacgcggaagttcatctcgtcattattcaaaatttcgataaactcaacatttactcgctctgggaacatttcatgtgtctcgagaactggtccaagtgttgtaagaggtgctttttctacatcatcaacaaaaataaccgcatgcggatttcccattgaaacagctgtaaatgcataacgatgattattgtataagaagttttcacgaataaatggtgtttcaccttcaccaagcattggtatttctgcacgtgttagacgaggtgctcccatatcgatttttgctaatgtcacgacaccatcttctactgttacttcagccgttacaataccagctaacgtttcaattgtgaaaactgtttcttctactagtttatgctcatacgcatatttcgctacgcagcgtaaaccgttaccacagctctttccttcagaaccatcattattaaacatacgcatcttcaccggagctacgtctgaagggcaaattaaaatcatcccgtctgctccaataccagtattaatatttgaaaccttttcggccacaagggctaaatcttcttcaggaatttgctcttcaaacatatttacatatatataactattgccaagaccatgcatttttgtaaaagaaaattggctcatttatattcactccaaaaataatttgttatgttaagtataaaatgcatgcttttagaacacaatatgaatgtcccccgtttctcatatttgacaacgtttggcgatgagccactcttacacaatttgtgtaagaaaaaagcccttctaaaaagggcctttttttatttatcctactattttcgattggggaagactaatactcagtattagtcttccccacgaaataaagttttatctaatgaaaaaggtgctgctaattcgcaacaccttaaaacattggattttcatccaaatactcatatacattattaacaagctcttctactgttgcaccttgtacaacttcaccatttacaagtgcaaatggtccttcaaaacaaatgccacaatatcctaaacaaccatactccattacatctaaattcggatctttttctaatttttctagagctgcttgtgaaccacttgcaaggttacctacacaaaattcaattaatggtttaatcaaaattctcccccctgtactacaaaacaaattaccttttcactttatctataagaagaaaactaagctgtttcttgttgttttcgttacacagtctaaactatttagttacttcattacttcacttcaaagtagatgatttcttctatataacatgctacttacaatgaaagagtaacttaaaaagaaaaacagtttacttttcttcttattgtacaacagagtattcattcatgcattgttatttgttcacaaattcgatataatttgattgagtaaagtcaaaatattttattaatataaaattttatgattaggggatatttcaacagaaaaggggtaatccatcatgaaacacctcgtaatactaggtgggggctacggtggaatgagaattctgcaaaggctacttccaagcaaccaacttccagatgatgtacaagtgacattaatcgacaaagtaccatatcattgcttcaaaactgaatattatgcattagttgcgggtactatttcagaaacgcatattcgtataccgtttcctgaacacccacgcctcaatattcaatacggcacagtaacaaatattgacctcgaagaaaaagctgttcatcttgatggcggcgaagcgatccaatatgatgatttaattatcggacttggctgtgaagataaatatcataacgttcctggagctagagaatatacacatagtctacaatcaattgaacaaacacgtaagacatatgaacaattaaatagtctagaaccaaatgcaacagtagctgtcgttggtgctggcttaagtggcgttgaagtagcaagtgaacttcgtgaaagccgttctgatttaaaaatctatttatttgatcgaaaagatagaattttattcccatatccagagaaattaagtagatacgtagaagaatggtttgtaaagcataaagttaacattatacgaaactctaacattacaaaagtagaaccaaatattgtgtacaaccacgatgaaccacttgaatgtgatgcaatcgtctggacagctggtattcaagcaaatgaagttgttcgaaaccttccagttgaacaagatggtagcggacgggttgtcttaactaaatatcataatattccaaataacgatcatgtttacgttgtaggagattgcgcagcacttccacatgcaccatctgcccaactggctgaaggtcaaggagaacaaattgtccaaatattattaaaacgttggaataatgaaccactcccggatgaactacctgttattaaattaaaaggtgttctaggatctcttggtaagaagcacggctttggtttactagcaaaccaaccattaatgggacgtgtaccgagattattaaaatctggtcttctttggatgtacaaatatcataaaggttaatactttacaggctgtctactatgtaggcagcctctttgcatcagtttttaaaaattatcagacacatctttctcaatatttataatgatttatttttcatttttatattaaaaaatattgataaacattgtatgctatttgtaagttgttttattacttcctttaagaccgagttcattcggtcttatttttcatgtgataaatacttttgtaggaggcattacattccacttatgaacttatcgaaactaaacaatcgaatagaagcgaaaaagaaagagctaatctatctcgttgaacgatacggattcactcatgataaagtgatttctttcagccaagaattagatcgtttacttaacttattaataaaactcaagacgaagaaaaaacgttgttcgttataaccattttcccctctttttttgatacgatataactagaatcagaaaggagcgatttatgtttatattaaaagacgttatatataaagatatactacacattccttatttacagattcaaaaagaaaagattacttgtattatcggtgaaagcggaagcggaaaaagcacattacttcgcatgttaaatgatttacaatccccaacatccggtacaattgaatataacggaaagttaatttctgattattaccctattcaattacgtcgtgacgtagttatgcttgggcaaactccacctatttttgatggaaccgttaaagacaacctattaatgggacttcgtctttctgaaaaaccatttccaaatgatgatgccctgcggagtgcattacaaaccgttagcttagacaagcaattagaagatagcacctcctcattatccggcggtgaaaaacaaagacttgcctttgcacgtatcgtacttatggatccgcctgtctatttattagatgaacccacttcagcattagacagtgatacagaacgccgcgttatgaaacaatttactgaactagcacgaaaaaagaaaaaaacagttatcttcatcacacactcgcaacaacttccagaagaaattgcagacgatattattgaaattagcaaaacaaagggtgcaactagaaaggaagtgctctcagttgaagggcgttattgaactccaaatttggcaacttgcagctgcctatattttcattcttattttaattggacttgtaaaattaaaaggaatacctcgcgaaaaacaaatcgcgctcgcaacattccgtatgacgattcagctcgtacttgttgcatatgtccttacatacgtatttgaaaacagtaatccattttatacaatcgctctcatcacttctattactacctttgcaatttttaatatttataaacgggttaacatcccaatgtctaaagaattaaaacgagtagccgccctttccatgatcgccggatcaattggaccacttctactatttatctttgttattatcggtcatgacccttggtatgctccgcaatatatcgtccctattacaggaatgttagttgggaatgccatgactggtgtttctcttggtgcaaatacgttcttaaacaatatgaaatcgcaaagaggtcaaattgaaggtgcacttatgctcggcgcaacaccgaaagaagcagctgctccgctcattcgagacgcttttgactctgctattttaccaacaattaattctatggtcggaatgggaattataagcttaccaggcatgatgactggtcaaatattatccggtgtatcaccattcacagccattcaatatcaaatcgccatcatactcggtatttctggaagtactgcctttgctgtcattatctttttacagcttggatataaaacgttctttaataagcgatgtcagttgaaagaggttgactatgatgcgaggtaaatcgtaactttcgctcagtaaatgatgcatcgttctcggtgagtgaaattatattaacgattttttcaatatatctatcataacttgcaatatatcaacgattttgcaaatatatctatcataactcagaatatatcaacgattttgtacgaaatatcgatttaccgacaaaaagtgacataataaaaagagggggctattcgcctcctcttctatttacttacgccttcttaacgaactgtgattttaacttcatagctccgaaaccgtcgattttgcaatcgatatcgtgatcgccatcaactagacggatactctttactttcgtaccgatcttcacaactgaagaagttccttttacttttaaatctttaataacagtaacagcatcgccatcttgaagaacgtttccgttcgcatcttttacaacttttgcaccatcattattttcagcttctgcttcttggccccactcatgagcacattctggacatacgaaaagaacgccatcctcatacgtatattctgaattacattttggacaatttggtaaagtagccataaattcatttcctccgttcattatttatacgtaaaaatcaaaattgatgtttacatctcgataaataaaatttgtatagcatttctttatagtgccatagtctcacgttattgacaaccctacctcaaattctcattttttattgtattttacaaaatttcaatttgtatgccgtttttctatttgctcttctactaattttaaaaatcttcgttgtgcatttttattttttacgagcaatcgaactcttagcttactttgtaaatatgagcgaactttgtagttcgtaataaataacttttgatacttctcgtcttcatatatcattcgaaaccattcatactgctgcaagtaacgtatgttaacatcaatctttttcgtgtgtaaacccgtacttaaactaatagatcctattagagcttctattaatgctgaaatcatttctctccccctaataaacaaaagaagaaccttcacaagattcttcttttcaaaatgaacgagttctctctagaaacccaaattattttcttcaatgtaaatttgatattcttccacttcttcttcacttaacttcttattattttcatatacctcttgccactcgaaataatcttcatcgaaataaacagcaaatttaattttcacgtttttcttctctgtataatcataaccagtaaactctactacgtcataatctttttctttcttaacaaacttccaagttggattatcagtcataatctctaaagtaaccccttcaccacttgaacgaacaacgtttttaatattcggttcagttggtaaaaaggacagcccgagcgcagctaacccaaacacaatcccgactataacctgtaaaccaatcataccagcaatacttacgccaccctttgattgtaagaaatacgccttctcatgatcagacgaatcttctcccttacgaaaaacacgaacagcatgcttataatataaacggtttccttgccatccagtaaatatcatcattcctaattgaagagctaaactaaatgttacataaatcccatctggaatatctataaaagggggtataaatatactaggtatagccaataacgcaaatataataaataacttatacatttttcgataagctaaccaaaaagttgggaagaaaaaggctacccaattccatgtattcccttgcgctggattttctactttcccccacttaaagtcataataagctgtattcttttgaacaactttatgtaattcttgtggagaaatcgtttcttgtaaaacagtgtccttcacgtacatcatccttttcttatttctatatacatttattgtatatgcacaaaatgaaggaatctaacaaaaagtacacatatttcataaaaatgaacggaaatcgaatatattccgacaattatccgtttcttatttcattttacttttaaatatattaaaataatcatgtatcatatatttaatacactaagttaattattttatatattcactaaaaaggatgcatcaaaatcatttttatacatcttttttagtgaatatatactacatttcctccctcttaatcacattgaaatactattttatttctcgcacattccccttcactttctcaataatatcttctatacgctccgctatacattccggctcccattctccctcaccgtgcatagctgtataaactggacagttctcatcgttactatctacaaaaatcgggtctccaagatatgaatctatccctattacaatccatccttctttccaatctccttcttcattcccgactaagctttgaccttcttcatcaaaactataaccaagttgcccttcttctatttcttcactattaaacaattctatcgtcataggttcagattcatactctagctcaatttcattatcatcagcacgatctacatgtgctaaaagttgtttaattttattatggttaatcaagatatcttctccattctatcttttaaaaatctaattttattcataatgagctgccgcaagtaacatttgagcaataaacttccatgaaatattttctggaaacttctctccttgatttatataaaccgattcacaagaacctaaccaactatttaatgcctctaaataagtctctacctctacattctcccattcatctctattcactttaaaatccttttggaggtatacaagaaattttaataaatcttctttagaatttacgtgatcgaggtattcatacacatccatactccgtccctccctctattgcatgttatctaaactaactataatatatgacataagattcttaaaactattatttgaggtgatcgaatatgaagagtacaatttgggcagacgatgactatttaaaactagcacccattaacgatgaactaatcaaaaaagcagaagaagtactgaacgtaaagcttccagaatcatatataaaccttctaaaagaacaaaatgggggaactcttcgtctcgatgttcaccctacttcaaagccaaattcttgggcagacgatcacgttaatgtatctggtttatatggtatttcttttgatgaaaatgaatctagtattttagagagccgctatttaattcgagaatgggaaatgcctgagaatatcatacttttatctggtgatggacatacatggattgcattagactatcgaaatgtagctgaaaatcctccagttatatttatcgataatgagtttgaggaaattattgaattagcacctaactttgaaagtttcttacaaaacttaactacttatgaatatgacgaagaataagcctggctctaaaaaggagcaagattttattacaaatttacacgccactttaaaaccactcggctttaagacaaaaagacatacatttttcaaagctgaaaacggattttataagctcattaacatacaaaaaagccagtttggagatgacttttatataaatataggagtccaccctatcggtctcccgcagcttattacgcaccaattacaaataaaagaaaacatttcaatattcgattgcattctacaaacgagaatagagcctatacatatcaaacagaaccagctattgcataatgtttcacatgaaactatcaacattccgggttacctttctactattttcgactggtttcaaacgtggacatcttatgaaaatttagtggaaataaatatacattccattactccggtactagctgtcgttccaatattagaagaaaaagcgtttctacttcttacttgtttttctttctacaaattaaaacagtacgaacaagctaatcgctacttacagcaatatttacattgcaccgtgcatctgaatactaaggaaaaagagcccatattctttcacgaagttgatatgtatatgaaaaaactagtagaaagtgcaatgtaatttcacattgttctttctactagtcctttatcacaattttatatcctatcctacaactcccaagtaatattcatttctgcaaatgactccttattagcttccaatccttcgctatcttccgttccaatcattgctacttcttctttagacaacttaatttcctcatttggcctttggatttttttctcatacacgagttgtaaaagctctatttgttcctctgtcagttcatactcttcttccagtctttccattgctgattctgtatcaagtaatggaatttctaataagaatccaccgtgctcttccatctcttcaaatgaatcaattgaatacgcaccactatcctcaatccaaaatgcagttgtaataaaaggaactgtttcgccttctacttcttctaatacgtattgaagtgcttcttctttcgcaatatctattacttccgaaggtgccccttcaaaataacttttcgcatcaatccactcatccattctctcactattcacatcttgaagacatacaatcgtataattcggatgaaacgtaattaccccttgtccgccttggctatcttgcatactatagttaaatccatcccatgaactttcatgtgagaaatctggacaatgcgctacattaattgcatgggcaatcgaatttaaaacgcatcctttccataattgttctctatctatatgtaatttatatttactcatcatcttcccccatgcacatattttttctattatctttcctctacacaatacttgtaaatacttttctatctactacaaaataaaaaagacaatacaccccactgtattgtccattttcttccctaccatttctctctacacatctcaattaaatgtagtaagtacctcttcgtcatatctgcccttctccaccttgagagcattcgcttttcttttggattctgccgtattctctctacttcttttaataaaggtccccattcttccgatgaatgttctaacaagtattgtagtcctctatcttttgaaacgattgttttatggtctagtgtatataaaatacgccccatcgtaacaaccgctgattctacccattcttctataaagaataaatatggcttcttcgccttcccactccagtactgttctacgttgtatttcatcgtatttactacatcattccattgtatttgcagcggaagatcttctgcttcttttccggtaactgtaatgccttgatttttcaacgtccaccatgtgaccgcattaatgtcccaatgaccaacattagctttaccatctgcacaatacacatactcgttcatttcatcattgtatttccctaagtcagcaagcggaatatacataccgtccattcttttacctagcatattatcactaagtttcttatgtagttccacaagctgctgtttttcagcttcattcacggaatcatttatcactgtaacaaaatcaacatcgctcgtttccttatgaaatgcacctagtgcgatggatccgtaaatatataccccgactattttttcatccaaaaaaatttcttttaattctactgtgtaccgctccattaactgctctacttccgttggtaacgcatgcttcactccatttttcatatctatccctccaataaaaaaagcctttgcaaattcgcaaagacttcttgttttataaatatttctcgatttcttcgtaaacatccttcaaacgaggatttccttctccaacaatttctccatttacaagaacgaccggataaaataaatcttcttccactacgcgctctgcgaatgcttttttatccgcatcttcttgttcttcttggaaatcaatatactcgaaattaaatttattttcttgtccttcatatttacgaccaattgccgcttgtaaccactcaaacgtttctgttgaagatggcattccaacgcagctcgcacaaattactttcgtcccatacacttgaacattaaccatttcttctcccccacttcttgtcccaacagtatattcagatgtcttattacataagcacatcattttacaaacttattccatacccctatactgaaaaaacacgatacaaaatttcgacaataaaacaagaagagaaaaaatagattttcccctctatcttgattataataaaactgatgaaaggagtcgataaaaatggaaaacccacatatgcaagaacaagtattagaagtattagataaattacgtccattcttacttcgcgatggcggagacgttgaattagtagacattgaagaaggtatcgtaaaactacgccttatgggtgcatgcggaagctgcccaagttctacaatcacactaaaagctggtatcgagcgcgcgttacttgaagaagtaccaggcgttatcgaagtagaacaagtattttaattaaaagcggaagcggctcgttcaaagtcacttgctaaaaggagaccaaatttggtctcctttttttattcaaatcacatttatccgttaacatcataaaacaaaattggaaatccctctcaaaaaatgcgataattaatactatatagtgaatcgttcacacatataaagtaaaaaacatagggggacgacacatgccaaaaatggggaacacttttttaacaattcaagaactagaaaagaaaaaagagtatttattaggcctttcatccgctataccaacgtggaatacaagctatcaatttttatttaaagaaatccagcaagaattattgggtaaagtaaatgaaaagctcgaaaagcatcaattcgttttaaatatatgtacagatcagcaggtaggggcataatgtattacataaaattgtggtatataaaaaagagacctcactcggtctcttttttatatttttaagataaccaatctaattttctaatcccaagcttatctactggtaaacgaagcgaaccataaaaatgcttcataaattgctctgagcggttcacatcgtgtaaaatggcttctaagcgatctctatatatgcttttttgttcttcgtttccagtttggtaatatcgttcgaccgtttcaaaatagtgcagcgggaacaggagccttgcaaataataagcgccagccaaatgaggatagcgaataattccgttcataatccgtaacaaattgaacgattgtttgctcccagtctttctttttttctatcgtcatatggcggatccattctgcaatatctcgactcgggtgatcatacacccaatcaaaaggaagtttgagacgcttcgtttgatgccataataaaggtgtgaatcgttcttggcaaattgttgctgcatccgttagttgcggcgtatcatccatttctgtatcgacaacatattgaatggcattttctgcaactcctaagtaatacgggaaggattcaataaacaattgatcgaatacatctgaagggtggttcatcacttgtgattgccaaaacttttctaattgatcgagccttttttcccataacgctttccattcaccaattcggcttaattgctcaatttcttctggaaagaatgcacctcgtttatggaatatagaaagctcacttcctaatgacatagcatgtcgttctaacgtgcgcataccttttaataagcaataattttgttcttctatctcacttacatagtagccgtgtatagtcggaacgaaagtcgctacagttatatccccttgctggttcatataatcactgagctttttcatctctacaagtacttcttcctccatttctccaattggaacaagtacataaattttgttgcgaatccaaaagcttttataggggccaagggggattaattctttaacatgcatgtgataatgctcataaatatgctgaatcatcgcagtcgccacctatggtttttctttatatatatgagcttgtgctcgcctttcattcctatgcacatgataaagcaacgaaacgtatacaaatactaaaaagaaaaaaaggtgataaacatgaaagaatcaaatcaactacaagaaagagcattaaaactattacaagaacgcggtgtaacaattgacgatattgctgaacttgttcattttcttcaaaaaaaatatcatccaaatttagagatgtcagaatgccgttacaatgtagaacgtgtactatcaaaacgtgaagtacaaaacgcactgattactggtatcgagcttgatgtccttgctgaaaagggaatgctaagtgaaccgttacaagatattgtaaaacgtgatgaaggcttatacggaattgatgaagttatcgcactttctatcgtgaatgtgtacggctctatcggtttcacgaactttggatatattgataaattaaaacctggtattttagaatacttaaatgataaatcaactggaaaggtgcacacgttccttgatgatatcgttggcggaatcgctgccgctgcttcaagccgtttagcgcaccgagctgagcactcagaataatagtgttttctaggccgtcaggttcatgctgacggtctttcatattccatcagcataaattctcttccgcgactcaaaaaaataggcccttgcttaaatccgatatttttatataacgtaatcgctcttgtattaaatgtcgctacgcttaatcgaaacatttttgcattaaactctttcgtggcaaacgctattccagcttggaagaattctttccccattcctttcccggttaacgccggcttcatgccaagtccaatatcaatcacatcttctccaccatataaatgagcatctcttccaccatataaatgagcatctcttccaccatataaatgagcatctcttccacctggtacttgtgcatttgctccaaaacaaaaataaccgatgaggtctccttgatcatcacaacagccataatacgttccatctaatagctcttccattacttctttctcgcctgaaaaactatataaattatatggttcctcgtacgtccaagtatttatctcatttgcttcttcctctgttaatttatgtatatccactttctctttccccctattatatttctattaacaatattcgatattcatcttataattcatctttctcaatatatttttttaatttcttgcttaatttttatggaagatttttcttattatgttacgattaaacagaatcattataaataaggtggtgacaatttgaattacttttcttatctctcctcagaagaacggcaaaattttttctataaagaacctcttagtttttcaaaaaatataggaaaagaacaactagcttacgcactaggcgctacactatatactcctggcacgaaagaaacgattgcggaagatataattagaaggaaacatgtggatgctatctcaattattctttgtctagaggacgctataagcgatgaggaagtaaaacttgcagagcaaaacatcgtcgttcaaatacagcaaatcgctaacttagtcagtgccaacatactaaatcaagcagacatcccacttctttttattagagttcgacagccaagtcaaatgaagaaaattgttactgaattaggtagtgctgttcattgtttatgtggttttgtctttccaaaattcacaccgattaacggaaagacttatatcgatcagcttgcatatataaacgagttatactcattatcgctatatggcatgccgattttagaatcacccgaaattatgtataaggaaacacgggcagaatcattattacaaataaaggatttactagattcttatcacgattacatcttaaatgtacgtattggtgctactgatttttcaagtatatttagtattcggcgcaataaatacacacctatctatcatattactgttgtccgtgattgtatttcagacattattaacgttttctcaagggcaacaaatgaatatattatttcaggatgtgtatgggaatatttttctaatgatcatgaagaagggcttattcaagaggtatcacttgaccatgcaaatggcttaatcggaaagacagttattcacccatctcatattaaagttgtacaggcaatgcacattgtcacaatggaagattatttagatgcgagattaattttacaaaatgcagatacgtataatggagtgctaaaaagcagtttttctaacaaaatgaatgaagtaaaacctcattatggctgggctcgcaaaaccattttaaaatctaatatttacggggtgctacatgaaaacaaacaattcaccgatctccttattacaaacgcaaagcaacacgtataacgttttaaataatatacaagttcatgtagaagtacgtgataatccatataatttagcgctagacaatctttttcaaatggctgcgagaataaataagaaacgtagttttttatttgtgagtacaatccttggaaagcatcttcctattaaacctgcagtctctctatcaagtggagttgctctcgctgcaagatatatggaaatactacataatatttctcatccatttcaaaaagaaattttaaatctcatttcattagaaattgatgaaatcccagaggaagtatttcgttatcaatatcctctgcaagaagaagttttgttcatcggattcgctgaaacagcgacatcacttggtcattctatgtttcaatgctttcaaaatgcaaagtatgtacatacaactagggaatcgataccccacctagaatctgtcattacatttgaggaagaacattctcatgcaacatcacaccgttgttatgtagatgaaagcttttttcaaaacaacaatccaattgttctcgtagatgatgagatgacaacaggaaaaacagcattaaatattattagatctattcaaaataaattcccacgagaagaatatataattgcttctttgttagactggcgttctcatactaatagaaaacaatttaaacaattagaagaagaacttcaaattaaggttcatgttatttctttattagaaggcagtattcatacaactggccaaccattaaatattgcaaaaaaagagattcaaattgaagaaacaaaacctgatttcaaaaaacatacccttacctgcctaaaatcaccctatacatcaaattatataaaatatactgggcgatttggcatttcagcatatgaacaaaagcacattcattctttcgcccaagaagcaggaaaaactttaaaaagagaaagaattggaaaacgaacactctgtctcggaacgggtgaatttatgtatatcccaatgaaaattgctgctgaaatgggtgaaaatattttatatcaatctacaacaagaagccctatccattctgtttcaaatgatgtgaactacgccattcataatcatttctcatatccaagtcctgaagattctactattacaaattacttttataatatttcacctcatgattacgatgaagtatttgttttcattgagcgtgatttaggggaagaagccctatctcctcttctacagcagttacaaacagttattccttttattcatatcgtctcattttcaaatagcatagaaaaggaaggttgataattatggtaaaagtaaattctcatattagtagttacaatccaaatgatgctatttttctattaaaagatattagtgatttaatgaaagaaagttccacggaaactagagaacaagcaattcaagctggcacacattattccgaaatgttaccaatggaatataaaccctctaaagcgtatatggatttattcttttcttccctgcaacaatacaaacacaaactagccatcgctgttggagttgtcgccgaacagattatacaaactaaaggaactaaccttgtcctcgtttcattagctcgtgctggtacacctattggcattcttatcaaacgctacatacgctatcaatacaaccttgatgtacctcactattgtatttctattgttcgcggacgcggtattgatgaaaatgcactccattatattttggaacatcaccctaaagaaacaattcaattcattgatgggtggactggaaaaggtgcaataaaaaaagaattagaatatgcagtacacacatttaacgaacgaaataatacacacatttctcattgtatggctgtgcttgctgatcccggttactgtacttcaatttacggtacacgtgaagattttcttattcctagcgcttgcttaaatgcaacagtctctggactcattagccgcactgtactaaatgacacctatatcggtccaaatgattttcatggtgttaaatattataaagagctagagcaagaagacttatcaaatttcttcgttgatgaggtaacagatttattcccttctgttcattctcatatagataatcaattacgttatattacttcaacttacactgatccctcttggcaaggattaaaagatatacagtctatccaaaatcactttgaaattgacgatattaacttaattaaaccaggagtcggtgaaacaactcgcgtattactccggagaataccgtggaaaattttaatacgtaagcaaaacaatcccgatttaaagcatattttacttcttgctaaagaaaagaatgtctctattgaaatctatgagaatatggcttattcatgttgcgggctcattaagccccttaggaggaaaacgatatgattttcgccagtgatcttgatcagacgcttatttattcccggaaatcgtttcgtgcccctatagaagatgaatcaattcaactcattgaaactttagatgggaaagaaatttcttttatatcacataaaaccatttcactactaaaaaaattacaactgcactcacatttcatcccagttacaacaagaactattgagcagtttcagcggattgctttattccaagacgaaatcattcccgaatacgccattacaagtaatggcggtaatatccttcataacgggaaacaagatggtacttggaacaggacagtaaaagaaagactatcggttgaatgtatagagagaaacgacatactaaaggaatttggacaaatagctcataaagattgggttatatcacaaaaaacagccgatgatctattccattattgcattattaaacgggagaacattccttatgatgaattatcatctttcacttcctggttagacaaacaaggctggaatcattcacttcaaggtagaaagctatactttgtaccaaaaccaattaacaaatgggacgctgtgcaatatataaaagaaattttgcaaatagatacgattattacagctggggattctttacttgatttatgcatgcttgaaaaggcgaaccatgccttcgcaccacttcatggtgagttaggggcaatgcatgataacttacaaccccatattttaaaaacagacgcaattggcatatatgctgcagaagaaatcgtaaataaatcacttcaaattattcacagttcattacctaccccatgatcataatatgcacaattgcatacgcaccataattaaacaagtggtacaatttatttgaatcgctgttgctacacttcttgattaaagaaaaggcgttaacacggaaattagcgtcttatcaacctcaagcaattggcacattttgtcatcttaaaagacactccaacgagtgtctttttttctatatccaacaaggacttactcatttcaaagtataaatacataaaataatgtaaatcattacacgcatgaatcactttctaaaagttataaagtagattcaaaataaaaaagcactcttaactagagtgctttttactttcaaacaaggaggctacatatatggatagcactctcgtatttaatttcggcatcgggcttgtcattattttatttgtcttctttgtactttgtatgagcggggtataaaaaggcgattttcgggcgtctttttatacatacatatgtattacttgacttctacaaaaacagtaaccataatagttacagatatacaaataactattcacatatccacaaataggaggaagaaaaatgaaacatgtaatcgtttatgcacacccgaatacagaaagcttcaaccatgcgattttagaaacggtaaaaagtgaattagaaggaaaaggtcacgaagtacgcgttcgcgatctatacgaattaaactttaatccagtattaggcgcttccgatttcatctcattttctaaaggaaatacaccagaagatattaaagaagaacaagagcatatctcttgggctgatagcattacatttatttatccagtttggtgggcgggacttcctgctattttaaaaggatacgttgaccgtgtgtttagccatggatttgcttatgcttacggtgaaaacggtattgaaaagttattaagcggtaaaaaaggattgttattatctacaatgggcaatacgaaagaagcatacacagcaggcggcatgtttgatgcgatgaagaaaacagcggatgttggtatttttgaatttacaggcattgaaacaattgagcatacattctatacaagtgttccttctgtggatgacagtgtgcgtaaacaatatcttgaagaggttaaagacgttgtgaatcgtgctttttaataaaattatatcagtgattttctaaatatatcagcgcaactcatattatatcagcgattttctaaatatatcagcgcaactcatattatatcagcgattttctaaatatatcagcgcaactcatattatatcagcgattttctaaatatatcagcgcaactcatattatatcagcgattttctaaatatatcagcgcaactcatattatatcagcgattttctaaatatatcggcgcaactcatattatatcggcgatttttcaaatatatcgacttaccgacaaaaatcgacactagtcacaactgaatgttagcccacaccaatcgggctgcccgcaaatattagaaaaaaagctgttccaaagtttggaacagctttcttcattacatcttctcaatccactccgtcaagttatgcacaacttgcgttggttgtacttcatattctgttaacttctccacagttgtgactccagtgtggacaagaagggtatgcatgccagcatttactcccgctaaaatgtctgtatcgtagttatccccaaccattaatgcttcatttttttctatgccaagcacttttaaagcttgttccataatgattgattctggttttccgataaagattggatccacacctgtcgatactgctacaactgatgttaatgaaccgttacctggtaataatccgcgctcagttggaatggcaatgtccccatttgtagaaataaacgttgcgccgttacgcacagcaagacacgcttttgctaatttttcatatgtgatgtcacgatctaaaccaacaacaacgaaatcaggattttcatccgcaagttcaaatcctttttccacaagtgcatcatgcaagccttcttcaccaatcatatatacagttgcgtcttgtttacgttcataaatgaagttcgcagtcgccatactcgttgtgaatacttgctctgctttcgctggaatatcgaaacgaacaagtttttctgccacttgttctggtttacgcgttgagttattcgtaacgaataaataaggaatgccgcgctctcctaatgcttttacgaagtcgcttgcctcttcaatttgttcttccccgcgatacatcgtaccgtctaagtcaattaagtaacctttatacatcgattatgtctctccttctatgctaacgttctcaccttatcataccactcttatattacccgctttttccaaagaaaaaaacgctttacctaaaagcgccccataacgttcattttttctcttttacttggtaagaacaactacaatcgccctcacacatatttgctaacgtctttacatctgctcctgcaaataaacgcttatacatctctttttcatctttacatacttgcgggaatctctctgcaatttcctttaacggacagttttgtttttcaattacgaaagaattctctccatctctctttatttgaaccatataaccgtttttctcttgcatagctgctatctcttgcactttatatgctaaattcttttgattactcactctcttttgtaactgttcttccattcgcttcgttctctcttttaaaacgtaacgaagtattttttcatcacccattcgagctaaatcttctagcatatcaatcgcaaattgcttatactctttcgggaatgtatcttctcccttttcacttaatccatacaaataagttggtcttccgacatgttgccttaccatcttagaataaatgagtccgtctttctcaagattacttaaatgtcttcggatcgccatttctgtaatctctaaaacgtcagctagttcagctaccgtgtgctctccctttactttcaacaattgtacaatttcgtctttcgtcgtacgtgcttcccccatacttcacccttctcccttttctttctcacatacaatataagatccccaaaaggcattctctggggatcttataagcataattattctggtacaaatgcagatacaggtcctaattccttttctaaataactgcgaatatttgctgggtatttctctaccactgcaatatgtttttgaatcgtcttatataattcatcatgattcatttgaatatagtcttgcgtaagcatttttcgaagaaggataatttctttcatcccttgtccatcttcttcacttatcactcgctcgtccattaaaatatcaataatatcttcatagcttcctggatcgcgcataataaatccatcaatcatcgcattcccggcatctaatacacaatcaataataagatgggctatgcgctctaatgcgtaaaattcaaactcggtttcatatatctttttctcttgaaatgtacttgttgctcgttctaaacatactagcatttgttctattttctttctgtctacaaaatacatgaatgtcacctacctggaaattaaagcatttacattttaattgtaacgctttcttctgaaaaaatcgacaatttttcgaattcaccttttctccgttatttgttatagttatatttgtatgatttttgaaattggaggaatggaatcttggaacgtgaactcgcactagaaattgtccgtgtaacagaagcagcagccttagcatccgcacagtggatgggccgcggaaagaaaaatgaagcagatgatgcagcaactacagcaatgcgtgatatgttcgattcagtaaacatggcaggtacagttgtaattggtgaaggagaacttgatgaagcaccgatgttgtatattggtgaagaactaggaacaggtaacggtccagaagtagacatcgccgttgatccattagaaggtacaaacatcgttgcaaaaggtcttgcaaatgcaatggcagttattgcaatcgcagacaaagggaaccttcttcatgctcctgatatgtacatggaaaaaatcgcggttggtccaaaagcagctggtaaaattagcttagatgatccaattgaaaaaacaattgaaattgtagcagaagctaacaataaaaagattcgcgatctaacagttatcgttcaagaacgtgaacgtcatcaagatattattgaccgtgttcgtgcaaaaggtgcacgcgtaaaattatttggtgacggtgatgttggtgcgtcaatcgcaacagcactacctggaacgggtatcgacttattcgtaggtattggcggagctccagaaggtgttatttctgcagcagcattaaaatgccttgaaggtgaaatgcaagctcgtttagttccaatgaacgaagaagaagaagctcgttgtcgtgaaatgggattagaagatcctcgtcaacttcttatgttagatgacttagtatctggggatgatgcaatcttctcagcaactggtgtatctgctggtgagttattagacggtgttaaattccttggtggagatttagctgaaacatactctatcgtaatgcgttacaaaacaagaacagtacgattcattaaaacgcatcaccatttagatcataaaccacacttaaacttagatatttaataaaggagccatgtgtatggaagaacgtttctttctgtacgacgatactgtcgctacaaaaactcgtttcgttagctttatgggagaaaatgagcgtcacgatttagcgctattatactccgatcgtcattacggtaaaacaattgtccttgatatgcaacgcaataaatttgcaatcatcggtgctgacgatttaaacgaaccaggctacttagagcacgcattttctatgactgaagaaattgcagaagaattacgctcatttttatttgaacttatataatttatcgtatgcaccagctattttagctggtgtttttttattgtaattatttttaattttcaaactaatatgttataattaagaataaatctatttggatagaaaggacgttatctacgtatgccaacatttactttgtaatggaccagcaattggatagcattactctcaaaaaagcaccacgctttttcaagggagtagtctgcccattcccattacaaaggaacgtaacgcatctgtagtatgatgtttacggaggttcctaagggaacctccttttatttttgtctttttctcatgtcttcatactacaagacatccaaatagctgtattacgtttctttgccactactataagaggtgaagaaaaatgcagaaagtacaactttcttggagtttatatgaaaatgagcaaaacacaatcgaaaagtattgtaaaaattgcagacgcactaccttatttactgacacgaatattcgtaggcataacgccaacggaaaaaacatataccgctttgccatttataaatgtccgaaagatcatacgtggaatcaaaaactgcgtatttataaatcatttactgatcacgttgaaacagtcgatatgacgcagcaagatcaagccgaaacaactactactatttccattatgcaacataaagaaaacggcatagctaaaatcacgatcgtattagacatcgttttcggttcccaccgcatcgataaagccttatccacatatatttccgactggagccgtacactcattgtggataaaattaaaaatggggatattcaattgaatggacaacaaatgaagccaaatacaatactatctgaaggagattctatttcaatttgtttataagggggagtctcatgctaaatgtgagaaaaggtacgatgaatttattagacgaattagatgcaatgtatacagaatgtaaaaaagcgctcttacaaaagaaaatttatcaatgggatgattcatatccgactcgagaacatattgcctatcacttagaacaaggtgaactctactgcctatttgagcatgattcgctcgttggtgctgttgtgttgaatgagtggcaatctccagaatatgagctaattgattggtcagaaacacacggtcgctttcttatcgtccattctttcgtcatccatcctttcgcccaaggaaaaggatatagcaaagtacttttatccttttgggaaaatgaagcaaaacgaaaagactatacgggcatacgattagatgctttcactggcaatcccgtttcattgcgcttgtatgaaaagaatcattatatttgtcgaggtgctgtttatttttcaagtaaacagcctcctcacaattggtataactgctacgaaaaaaaactcttacaatcgtaagagtttttttacttcttcacttttcgtaatacaaaatgtgcgcaaccgaagttacagtactcgtataaatactccgttaacgtactaattttcgtatcatatgtcgcacgctggttactatcatcaaagaatccgcgcagtctaagttgctcatatccccagtctccaacgatataatcatatttatttaaaatttctgcatagcgctctttaaatgcttcttcactaaaaccgtcacgaaagtttttaattacttcgtactgcacattattaatgctcaccgtagcatgaatctcttgcttttgctccatcattaacttcctctctaagcattcttctttttatcgtatcacaaagcataacaaccaacaatttcaaatacaaaaaattgaaaattagtgcatgctatggagaaggaggtgatacatcgtgaaaaaacaaattatactctctctcctcactctttccttatttgcaggctgccaatcaacgaataaagccgaaatggaacgtgaagaaggaagccgtgttcttgtttccaacaaaaacgacatgtatcatacggaaaatacaaatacacgattaacgagagtcggttattcatctaaacaaaagcatgaagtgtctaacaaacaagtaggggccattaaccgtgagaaagtcgctgaaatgattacaagcatgacagtcaaacttcctgacgttacaaacgctgctacgctcgttaccgatgatgaagtatttgttgtataccgtgcaaacacaacggatccaaaactcgtagcggatcaagtatatagagctgctttgtccatcgtccctcgctattataaaggatatgtatcaacagaccaaaagttgatttcccaaattcaaggtcttcaatctggcgcattaaatgatacagaatatacgcaaagcctcgatatgctaaaacgtgaaatgagtaaaaatcctcatttgaacaatacgggagatcagactttgaatgatatgattaaaaagtaaaacaggtggagaaaatctccacctgttttactttttattttttattacgattcgcataaacctccatcgcatcacacataaattgcgctaacccctcaccaaacttatcgatatttttcgtgaagcgctcatcagcgacgtacatttgaccgagtcctttaaaagcatctaatgaatatgcaccgaagttttgcaagtaatcgtaccacactccaattgcttcttgtgcctctttagaatctggtgctccgtgtctaagcgctgctaaatttctataaatagcattaaactcctcttggttctcttttgacataccttttgcatattcgttcgctttatctacagctgcatctccccatttttcacgtgcttcttcttcatatgggttatggctgaaatcgaatccttcaaatttctctttgttcgtcatttcaatctctccttttgtatgctgaattgttttatcaatcgtcgcaatcactttatctaatctagcacgcttttcaagaagcattttcttatgaagctctagtgcctcttcgcgatcaaatgatggactcatgataatctctttaatttttttcaaagggaagccaagctctttaaaaaacaaaatttgctgcaatgtctctaaattttcattggaatacagacgatatccagactctgtcgtctcgtctggggttaacaacccaatttcatcgtaatgatgcagtgtgcgcacactaattccaactaaatcagctacttcttttactctcattgtcatttgtatctcccccttagtacatacgataaagtatgacgcaacgttagagtcaataagtaaattcattttatcttaaaaagtttcatctctcctatatttgatgcataatagttatgtacatatattagaaagcggtgaaagtatggtttcaaatactgtaattgccagcatcatctttcaactcattgtctcgattctggtcccaattattgtactcgtttatttccgtaaaaaatataatatgaattggaaagtagtcggcattggtgttcttatctttatcggatttactcaaattcttgaaacaccattccacctatttatgcgcggtaatccaacaatcgctccatttttagaaaatccgtttgtcttcgcaatttatggcggattgactgctggtatttttgaagaattaggacgcttcgttgccttcttcttcttactaaaaaaatatctagaatataaagatggcttcgcttatggaattggtcacggcggaattgaatctattttaattggcggtttttctgcattacaagcattaatctttgctaattctattaacgatggtagcttcgctcgactgattgaacaaaaacccgagctgagcattttacaggacatgttaattcagcaacctgcctacttatacttccttggtagcttagaaagaattatggcactcgtgcttcaaattgcctttacaatgcttgttttatacgcagtaaaacagaagaaatatatcttcctagtatacgctatactattccacgcatttgtagactttttcgcggccctttaccaaacaaaaacaatcaatatcttcgttgcagaaggaattacacttctttgtacaattggcgctgtcgttcttattcgcaaaatgaaagcgaaattaatgagtgtaccggagtaaaaaataaaccaccgattggtggtttattttttatggattgtcgcaatgatgatagctttttccttcttgcagctccctctttgtttctgcatctataacgatatatttatgaaactcttctacttcattttgagaaaaggaagcaaaaaaataaacttggcgatcaggatgaacaaaaaaatcttgaagcatcacactactccgacaacccacggctgttttttgtaggaaagaaaattcttcatcgggcacttctttaaataagatttttttcgaacactatatgctgcattattgtattctttataaattttcttatctaactgtttataaaaaatatcctcactcacaaatgacttatttcgattgcttggataatttactttttgattcgactctgcataagttgtggacaagtgtataaaaaaaacaaagactaactacaatacatatcattttattcatgattgcacctcaaatgttcattatccacattacttttccacatatttaaatccatatgccgttttacaagaaaaaggaattatttccacatttgtcgaagtatatagcgtcaacttgaaagatggggatgaattatgaagaaaattattgtaatacgacattgttcagcaactgggcaaaaacgtgatgctgaattaacgaccgatggaaaagaccaagcaaatacccttgctacatttctcttagaaaatcatctacaaatcgatcatattatttcaagcccatttgtccgagctatcgattccattcggccctatgcgctccaagctaacttatctatccaagaagatgaacgattaactgaacgcatattgagcaacgttccaatggatgattggatgcaaaaactagaatctacttttacaaatatagatattgccttttcaggcggagagtcaacaaaacaagcaacagaccgtgccatatcgcttattcaagacgttttacaattaaaccatacaacaacactacttgttacacatggcaatttacttacgctcattttaaagcattttaatcatacgattggctttaatgaatggagaactttaacgaatcctgatatttacgaaattacaatcgacgaacaatgtatcataaaacgcttatgggaagcatcgtctaagtaatatccctttccaaaacattcagttgacgccacgagaagaaactgtactaataatagaaaggggtatcactccatatgtacgaagatgtacttgctctactacataaaacaaatgtttcttatgaaaaatttgaacacgaaccagtactcgattatgagacagatcggattgtacgtgagagactcggcttacaaggcactccaagtaaaagcttatttttaaaatcaaagtctggagattattacgtattttttacgttagagggcacaaggctcaaccggggagagatgaaagaactaacaggagaacgcttatctctctgttctcctgatgaactgcgagacaaaactggttgtacgccgggatgtgtggctcctttcggatattcacacgatgtaacaattattgtggataacgctatttatacgtacgataaaattttaattacacctggtgtacctgaatttacaattgaattatccacagaagaattaaaaaagattttattaacatgtccaaataccgttttagagtataaacaaaaagagagctaatcgttagctctcttttttcattatttagcttctgctgttttttcttttgcagaacgtacttgctcatccgcatggtaagaagaacgcacaagtgggccagcttcacagtggctaaatcctttgctaagtgcaatttctttaagctctgcaaattctgctggtgggtaatatttaagaactggtaagtgcttcttagatggttgtaggtattgcccaagagttaaaatatccacattgtttgcacgtaagtcatccattgcttcaattaaatcttctctcgtttcacctaagcccaccataatgctcgatttagttggaatatcaggctgcatttctttcgctcgacgtaaaaactctaatgaacgttcatattttgctctagcgcgaactcggtcagataatcgacgtactgtttcaatgttatggtttaaaatatctggttttgcatccattaacatttttaagttttcttctactccacccatatcagatggtaatacttcgatagacgtgaatgggtttttacgacgtactgctcgtactgtttcagcaaaaacagctgctcccccgtcctttaaatcatcacgtgcaaccgctgttataacaacgtgctttaagcccatttgtactactgaatctgccacgcgttctggttcttgtaaatcaagctcagttggtaagcctgttttaaccgcacaaaaacgacaagcacgtgtacaaaccgcacctaaaatcataaatgttgctgtttttcttacagcccagcattcatgaatattcggacattttgcttcctcacaaactgtatgaagatttttagaacgcatcattttctttaagcctgtatagttttcattcgtgtttaacttaattttcaaccattcgggcttgcgcttatattctgtttgttttgtcatggttatcaactccgcacaatatgaaatagtttaccgtgttcgcttctttcaatgtaacatatctattctaacgtatgaaagcgatttgctcaaatgaagattctaagattttttccaatcgttccctataatgaaatactccgtatatcccacactaaaaagagtgatgttgtgaaaggagtctatttcatgcttcgaaaaatttctcttttgctttctatttgttttcttctccaccaaaacatcgcttacggtgaagataatcagcaaagcatatacgaaaagcgcatggcactatataaagaaaccgagcagtcttcaggcattccatggtattacttagctgcaatggatcaatatgaaagaaatatacggagcgtaagaaaagatattccgaaaaaaccagatgccatcatttccctttatttcaaaccagaaatatgggctggacctattaatagtaacgatactcttccccatacaatttctctatttggcggaataggtttagatggtgacaaagatggatttgcaaatgcaaatagcgaccgtgatcttctgcataccgcagcgactattttaaggaaacaaggaacatcagaagaccgtattaaaattatgctctgggaatattatagacgtgccaaaacagttgatttaattagcgaatacgcccaaatttataaacattatggacgtattaatttagaaggaaatgcttttcctcttccgatccgtagtgaccatagctaccgtagtactttcggcgctggaagaagttttggcggcagaaggattcatgaaggaaccgatatttttgccggatatggcgtgccagtaagatcgacttgctatggcattattgaaacgaaaggttggaaccgccttggtggatggcgcattggtattcgcgaccttcataacaattaccattattacgctcatttaggcgggttttcaaaagaaatacagcttggacaaattgttgagccagggaaagtaatcggatttgttggtagcactggttatggacctcctggtacagccggaaaatttccgccccacttacattttggcatgtataaagacaatggctatacagaatgggccttcgatccatacatgcatttaagcctttgggagcgcaaagaacgagcaaatacaaaacgataaccgtagctgcattgctacggttattttttatccagtaaaagcctgactgagccgagtttcactttatttacaactaactatctgttttctttttatcaggtacagcaacacttccgcttccataatacgtaggcacttccccttgaacgatacgcgtcgcaatcggaacattttgtttcacctttatctctttcgtatgaaatggaataatcacttgcaatgttacttccatttccataacaatttgaatcgctgtagtattaatcccatgcggctcaattttttgtttaatatctgtattcacatgtccaactggcgtgaaatgaatcggaatatctggtcctatattaccaagaagtgcattatcagttacacgcccaaaaggaactgccatagtcgcgccgtttttttcagcaatacctagctccttcaacttcccttgttctacttgctgcaaatatttttctatgtatgtggtcgttgatgttacgatttcatttacttgctttgtatttaaattaattgtggatacttttccgtttttatcattctgtactttcattaatgaatctacatcgaatccttcattaattcgatcctttactgccttcgtcataattgccgtcgccattttatgtgtctctacttccccatatttaattaaggtcggctgaatattattattcacaatccacaacccttgcgtaagtaatataacaaaaagaataaacgacataagcagtatataccgaaaggcaataggtccccttcgaaaccgcgagtttttcgagcgaaatatactcataaaaaaacctccttcttatatcatttctatgcaagaaggagggacgatatatgcttatctcatttttaataatgcttcttttccaatcgtacctgctggaatgcctaatgcttcagctccagtcgttaccgattctagtggcgcttcaagaagttgttcaatcgttcttacaccaaccgcacggccagcaataattcctcgatcacctaatttctcatttaaaagacctacatctaatgcaccacacataatatatcctttatcgctcattacagctagcaaattcgtctttggaagtttcacgctaactgcaataaacgtataattatcaattataattggctccacattaaccatagttcacactcctctctttcttatctgtatgacaagagaaaaatgagtgttacaagttaactagcctatagtttaacggaagatgtataagttattaacatatctgttaacacatctctaagtagttctggcatataatattgtttgtcagaaagtgtggatagctctgggtataagtagccaaatgtaaacatatcaatcgttcctactgtatatatacgatctaattccagcgattccccgttaattaatacatcttcgagtaaaattttattcccgggaatcgtatctggaatgacttctacaccagcgtaaatcattttccccatcacttttccccgaaatccgaatcctttcacctcaagattctccatattcggcttacgtgctttcaaaataacttctcttaatatctttcctggaactttcaaagcacacggattaattggatgtggacaaattctgtgaatatctccgcgcgttacaacaccctcttctaacccttcaagaagtacaccagcgttcaccatgccaatctctgcattgcaccatgttttcagcgcacttgctaacatgtgagaaaacggcgtctcatgaaaccaatcaaccggtaatgactcttttaaatgaacgacagactctgccattatatgctcactttcttcctgcagtatttcaattgtggataacggctcgctataagcacctaaccgttccgtcttaatcgccctaccgtcttttttcagcaatttcttcatctctatatccacagtaagctgcacgtgaccaacgtaacgcccccacttttcacaacaacaaagtaaagtattattcagtagaataccacgctcaaataaatgatgcgtatgtgctcctaaaataacatctatatcataatgctctgccatatactcatccatactttttccaaggtgagaaaggacaaccgtaatatgagcctcatctttcacttcttctaaaatagactctaaatgaataatgggatcttcaatatgccaatcgagcatctgataaaactctggataagctaccgttaatccgataaaagcaatggtaatcccatccgtcgttgtatgcaatttataaggccttgcccatgacggacgtaccccttctttttcaaataaatttgcgacaagtatttcaaatccagcatcatcatagagccgattcaaatgctccttcgctaacgtaattccttcattatttccgatcgttacataatcatataacgcctcattcaaaagcttcgtattcccaagtccattcgtcgcttccgaaatactatgaaaacgatccacatgatcgccgatatcaaccgtcaaaacagtctctcccgcttcctgtcttcgctttttctcccctagaacaaaccgagaaatttgcggccaattttcaaaatgactatgtatatcgtttgtatgataaaggtggatgattgtttctttatttgtattcagagaaaaaacctcctctcagttccttactgccatttacgctatgcgcacacaataatcctgtaaatacttttcgtcttttcttgctattttacattgtactcgcattgtgagaaaaagcaaaagattgtcctttttatatgagaaactttatttttgccagtgtggggatttgttggtagagcggggatttgtcagaaagttagccgtggggattttcccataagttctttgctgcatttgtcagtattttaatctaaattactttcagttgccctctttatgtataaatgctcctttcctttttgaagggtacggggtattcgttcctcttgctatgtcgtaatttgttgataagtcgatatcccttgtcgaatcgtcgatatattgaaataatcgctgatatatttcgagttatggacgatatatttgaaaaatcgctgatatatttaactgaacacccacccgggtatcctctcccaagccaagacaaatccgcaaaacaaaaaagcgccctgcacagcagggcgctttcttcatacatatattatccagctttgcctcctagaccctcatgtctaagaaccttccgcacgagaagataaaaagcatcttctgtgcgaaagaaccttagccaacgggtctgaacagtcggctccgcatttctatttaaccaatagaaccttccatctcaaacttgattaggcggttcatttcaactgcgtattccattggaagttcgcgagtgaatggttcaatgaagcccattacgatcatttctgtagcttcttgctcagaaataccacggctcattaggtagaataattgttcttctgatactttagatactttcgcttcgtgctcaagtgaaacgtaatcgtttttgatttcgttgtaaggaattgtatcagatgtagattggttatccatgattaacgtgtcacactcgatgttagagcgagagtttttcgcttttggtccgaagtgtacgataccacggtaagttactttaccaccatgcttcgcaatcgatttagaaacgattgttgaagacgtgtttggtgctaagtgaatcattttcgcaccagcatcttggtgttggcctttaccagcaatcgcgatagataatgttaaaccacgagcgccttcgccttttaagataactgctgggtatttcatcgttaatttagatccgatgttaccgtcaatccattccatcgttgcgttttcttcacaaaccgcacgttttgtaactaggttgtatacgttgttcgcccagttttggattgttgtataacggcaataagcatcttttttaatgatgatttctactaccgcactgtgaagtgagttagtagtgtaaacaggtgctgtacaaccttctacgtagtgtacgtgtgcgccttcgtctacaatgataagcgtacgttcgaattgtcccatattttcagagttaatacggaaatacgcttgaagtggtgtatcaactttaacaccttttggaacgtagatgaatgatccaccagaccaaactgcagagtttaatgcagagaatttgttgtctgttggtgggattacttttccgaaatgttcacggaaaatatcttcgttctcttttaatgcgctatctgtatctttgaagacgattcctagagcttctaggtcttctttcatgttgtggtatacaacttcagattcgtactgtgcagatacaccagctaaatatttttgctcagcttctggaatacctaatttatcaaatgttgctttaatttcatcaggtacttcatcccaagacttctcagatttctcagatggttttacgtagtacgtaatttcatcgaaatctaagtcgtttaagtcgccgccccattgtggcattggcatttcgtagaacttatccagtgattttaaacggaagtctaacatccactgtggttcttctttcatacgtgaaatttcttcaacgatttcttttgttaaaccgcgtccagcacggaaaatcgaaacgtctttgtctttgaaaccatatttataatcgccgatatctggcagttgcttcgccatgttggtgtgtccctccttagataacctcgtttttaggaacctttaacattacttatcttcgtttaagcccttttctaacgctttccacgctaatgttgcacatttaatacgtgcagggaacttgcatacgccttgtaatgcttcaatatctcctaaatcgatgctgtcatcgtactcttttcctagcatcatgtcagagaaaattttcgaaagctgaagtgcttcttcaattttcttaccttttactgcttgtgtcatcattgaagctgaagacattgagattgaacatccttcgccttcaaacttcgcctcttgcacaataccttcttctactttcatcgtaagttgaatacgatcgccgcaagttggattgttcaagttaacggtaacactatcttctaatacgccatggttacgaggatttttataatgatccataataacttgacgatataacgtatctaaattattaaatgacatttgtgaaatactcctttgtcttgattagcgagtcaacaaatgtatcaatttcttcttttgtattatataaatagaagctcgcacgtgctgttgaagaagcttttagccacttcataagcggttgtgcacagtgatgtcctgcgcgaactgcaatgccttctacatctaatacagtcgctacatcgtgaggatgtacgtcttcaatattaaatgtaacaagaccagcgcgatgctttggaccataaattgtaacgccatctacttctgatagtctttctaaagcgtattgcgctaattcatgctcatgcttttcaatattatcaagaccgatttcttctaggaaatcaattgccgcaccaagtccgattgcattaccgataatcggtgtacctgcttcaaacttccacggaagctctttccaagtagattcttgtaaatctacgaaatcaatcatttcaccaccaaattcaattggctccatattgtttagcaattcttttttaccatataatacgccgatacctgtagggccacacatcttatgagcagataatgcgtagaaatcacagtttaaatcttgtacatctactttcatgtgaggtgtactttgtgcaccgtcaacgaccataattgcgccattttcgtgtgcaattgctccgatttcttttacagggttaatcgttccaagtacgttagaaacatacatgatagaaacgatttttgtattcggtgtaattgtttgacgagcatcttctattgaaattgtcccatctggttgaagcggaagatattttaaagttgcaccagttttcttcgcaacttgttgccacggaatgatattactatggtgctccatgtaagaaataacgatttcatcgccctcttttacattttcaagaccatagctagccgctactgtatttaatgcagttgtcgttccgcgcgtgaaaataatctcttccattgatttcgcattgataaacttgcgaactttctcacgtgcaccttcatacgcgtcggtagctttcgtaccgagcgtatgaacaccgcgatgcacgttagaattatattctttatagtaacgttctaacgtttcaatgacttgaattggtttttgagaagttgctgcactatcgaaataaacaagttgtttgccgttcactttttgatcaagaattggaaactgtttgcgtatttcatgaatattcattagcgaactttcctttcaattacctcaacaagctgtgcctttactccttcaattggaagctcattaactacaggtgctaagaatccatggatgactaaacgttctgcttcgcgttttggaataccacggctcatcaagtagtatagttggactggatctacgcgacctactgaagctgcgtgacctgccattacatcatcttcgtcgattaaaagaattgggtttgcatcaccgcgagctttttcatctaacataagaacgcgagaagattgttgtgcatttgatttagatgcaccgtgttcaatcttaccaattccgttaaagatagatgttgcactatctttttgtacaccgtgttttaaaatccaaccttcagaatgtttaccgaagtgaacaactttagttgtaaagttttgtgtttggttgccacggccaattgttactgttttcgtatcagcatatgaaccgtcgcccattaagttcgtaacgttctctgaaattgtgtttccgtcattcataaggcctagagcccaatcaatacggccgtcgcgtcctacaacgccgcggcggttaacgtaagttgttacgtcttttgctaatagatcaactgcaccgaatttcacttgtgcgccttgttccacgattacttctgctacgatatttgcaatacctttagcattttcatttgcaacatagttttctacataagttgcagtactgttcgcatcagctacgaatagtacgtggttatatacgttagcttcttcgccgtctactaagaatacagcttgaagtggagtttcaagaacaacgtttttcggaacatatacgaatgcaccaccgttgattaatgcagcatgaagtgcagttagacgatgctcgtctactttcacgccgtctttcattaagtacttttgtactagttcagcatgctcagttgctgctgttacgatgtctgtaaaaataacacctttttcttttgcttcgtctgctaaagaaacgaatgcagttgtaccagtgcgttgtactaatacgctgttattttcatcgattaagtttttcactgcttctggaagttcagttaaagaacttacaggctcttgcttagcagcgtcgccttttccgataaagtcccatttgtcaattttcgttttatcaggcgttggcattggaagttcagttgcttgtgcaagagcttgtaagcggaactcagtcaaccaagcagcttcgtttacttcgcttgcgcgttgacggattgtttcttgatcgaaaggtaatgtaccgattgtcatgtttatgctcctctcttacgcttcttgctctgttgtttcgtcttcaatacctaattcttttttaatccagtcgtaaccttcagcttctagacgttgtgcaagctcagggccaccagatttaacgatacgaccgttcatcataacgtgaacgaagtctggagtgatgtagtttaataaacgttgataatgcgtaatcattaggcaaccgaactcttcgccgcgcatttcgttaatacctttagatacaacttttaatgcatcgatatcaagacctgagtcgatttcatctaagattgcgatttttggctcaatcatcattaattgaaggatttcattacgttttttctctccaccagagaaaccttcgtttaagtaacgttgtgccatttctggatccatttctaggaattccatgtttttatctaatgtacggataaatttcataagagaaatttcatcgccttcttcacgacgtgcgttaattgcagaacgtaagaagtcagcgtttgttactccgctaatttcacttggatattgcattgctaggaatagacctgcttgtgcgcgctcgtctacttccatttctaatacatcttcaccgtcgatgatgatgctaccttctgttacttcatactttgggtgacccataattgcagaagataaagttgatttacctgttccgttaggtcccataattgcgtggatttctccaccttttacttcaaggtttacaccctttaaaatttctttgccatcaattgatacgtgtaagtctttaaccgttaatgtagaaccagccatctcaatacctccattaatcctatatatacattttaaaaattcctaaaacgttcatattctcattttattctcattctaattttatatcaaataaaatgatatcgcaaacgacgaaaaaaagtaaccgttttttcacaaatgtatataagtatttccttcacatctttctatgatacacctttcttcttatttatataaagaaaaaaggactggtaattttccagccctttccttatatttattcacttaccggaagtacagcacctttatattctttattaataaaatcttgaatttcttttgaatgtagcacttctactagctctttaatttcttttttcttctcatcacctttacgaactgcaatgatgtttgcatacggagagtccgctccttcaatcgcaattgcatcctttgttggatttaattttgcatcaattgcatagtttgaattaataaataaagcatcaccttcattattttcatacagctttggtgacaatccaggctctacatctgttttaaactttaagtttttcggattttcgactacatcttttactgttgccttaacaacatctactccgtcttttaatttaataacgccgcctttttgtaacagtgctagcatacggccacgctccgctacgttattactcataatcactgtcccgccatctggtaagtcttttaagcttttatacttcttagaataaatacccatcggctctaaatggatttttcctgcgtttacaattttatatcccttttcttgaatttctttatctaagtacggaatatgctggaagtagttcgcatcaatttctttatccgctaacgctttatttggcagtacataatcctgaaactttttaatctctaacttaatgccttttttctctaatatcggctgtgccttttctaaaataacagcgtgcggcacgttagaagctcccacaacaagcttattctcttccttccctccgcaagcagctaatgtaaatacagataatgctgtaacaactgacaatagaatctttttcatatgacgtccccttctccctatagttatgtagtaaaaaaggaccggcatacaccagccctttttcagcaattattcttttacaggaacaactgcacctttatattctttagtaataaagtcttcaatttctttagaatgtaatacttctacaagctctttaatcgcttttttatctttatcacctttacgaaccactagtacgtttgcgtatggagaatcatcgccttcaattgcaattgcatctttttctgggtttaatttcgcatcaattgcatagttcgagttaattaaaacagcgtcgccttctttattgttatacacttgtggcaacaaaccaggctcaatatccgttttgaattttaagtgtttcggattatctgcaatatcttttggagttgcactaactggatctactccgtctttaatttttaaaatgccttctttttgtaaaattgctaaaccacgtccatggtcagtaacggaattactcataataattgtcgccccgtctggaagttcttttaaactcttatatttttgagaatatacaccaattggttcaatatgaattttccctgctatttcaaaatcatattttttatctttaatttctttttctaaatatggaatgtgctggaaatagtttgcatctaattccttatccgctaacgatttatttggcaacacgtaatcttggaattttttcacttctaattcaattccttttttctcaagtaacggttttgctttttctaaaatttcagcatgcggtacgttagaagcaccaacaacaagtttcttttcatctttatctttcccgccacaagcagctaacccaaaaattgaagttgaaataagtgccgtaagtaataattttttcatttaaaatatcctcccgtttttattatcgtttatctattcgagtcgttaaactatcaccaatccactggattaaaaatacaactagtaatacacaaattgtcgcaacgattgttacatcgttattccctctctggaatccttctaagtaagcaagtgttccaaggccaccagcaccaacaactcccgccattgctgtatagcctactaaagcaattgtcgtaaccgtaataccagatactaatgctggtaatgattctggaattaacactttcaaaataattgtgcttgtttttgctcccattgcttttgaagcttcaattacacctttatcaatttcgcgaagtgcaatttcgaccattctcgcgtagaatggtgcggctccaataattaaagccggcagagctgcacttgctccaagaattgttccaagaagaatctttgtaaatgggattaataaaataattaaaatgatgaacggtatagagcggaatatatttacgaatgctccaatcaccgtattaattgatttgttttcccataaattatcttttgctgtcatgaagagtaacaatcctaaaattagtcctaaaacaaatgtcgcaagggctgcgattgccgtcatatataacgtttcaccagttgcttctaacatttgattccaatcaacatttgcgagtaacttatccatgtgcaatcacctccagctctacttgatcttgatgaattccttctattgcttgctggatcgctgtttcctcaccatttaaatgaacaactaaactaccgtaagaaccgttattcgtttgtgcaatatttccttgcaaaatgctaacttctatatcactgcgttgcattaatcgttgaagcactggtctttctacagcctcaccgataaactgcaaacgaattacttttccatctggatatttttcaattaaattttcaattgtttcatttgtatcttcagaatctgttaactgctgtacaaatcgtttcgtaatatcttgcttcggattacggaatacatcaagtactggacctgtttctacaatctttcctctctccattaccgccactcggttacaaatctttcgaatcacgtgcatttcatgtgtaatgagtacaattgttaaaccaagacgcttattaatgtctaatagtaaatctaaaatttgatctgtcgtttccggatcaagagctgacgttgcttcatcacataaaagcacttgtggattgttagctaatgctcttgcaatcccgacgcgttgcttttgtcctccactcagctgagatgggtacgcgtctcctcttccttctaatccaacaagatgaattaattcatcaacacgttttcttctcttcgctttatcaacacctgcaatttcaagtggaaactcaatattttcacgtacagttcgtgaccaaagtaagttgaagtgttgaaaaatcattccgatttcttgtcttgccttacgaagttcacttcctgtaattgctgatataacacgattcgcaattgtaatttggccagaagtcggtttctctaactgattaaacaatctgattaacgaactttttccagcgccgctatatccaataacaccaaatatttcgcctttttctatttttaaattggcgttatctacagcagtgacatcaccgcttttcgccttatatattttctttacgttctctaatagaatcatgatgttcaccccttttttgtttggatcgactccgcaattttttatttttaatgcgtgtagtccaatgttatcattacttttattatttgaatgtcctccacattcaaacaataaaaaaacctttctgctttagagaagcagaaaggtttatatgcgtatataacaacattatccctctctctcatctctcaaagcattcgctttgcaggaattggcaccatttcaacataagttgacggttgccgggcttcacagggcacagtccctccacctctcttgataagagaaatcagattcaattttcgtctgatttgaaatttatgaaattgtctatattttatgacttgaattgtatcaatatacactcaccatgtcaacagaaattttcgcaaaaaatgaaacttcagaattttaagcacctactgacatcggtttacatatatgaaacatcgattccactaataacatcgttcggtacgttcctgaatattgtacacgtccatcgttcattaacatttgcaatcgtacatttccattcaccaattgttctatatccttttcatctaagcaaatgatttgttccgttcctctttcctcatgtaccagctctatataatctcttgaaatttgtaacgaacaactttcatctccaaagcgaaaattaacagttttttcttcttgtcttaaaagcggttctaaatgatattgaccattagcgtaatttacaaatgattgaagcaaagaatataatctcaccctaaatcacatccttcatatcactttctattacataccattccctctcactaaagagcaatcctgttattttcgctcgacaaatactgtatccaccctgcatctcgacatatttcccaagaaatatgtcgaggcggcaaaaattttgccgcctactttaattccgtatataaatattcaaccgaatgaaatgcgtatatcttcttcatcagtgtcccattttcaaaaacaagtaaacaaggtacactttcaatcccatactctttcgctaaatacggagcataatttaaatctaacatcccaattttgaggccttcaattgtcatctcaacaactgttaacatcttttttgctaattggcatgttccacacattggagtatatacatataatactgttttttcttcgttctctattagggctgtagcttcggctcctgtccaatcaatcacttctatcattccttaccgtaaatattctgtataaacgtcaatgtcggctccccataatacatttgctaagtgtgtagatggcgcagttgccacttctcggtacgagcgatcaatatagatatgctcggcttgcggaaattcttttcgaaattgtttccttaacttttctccagcatcatcagcatccactagcacatacacttccttatcaaaaaactgatcaacgagctcatccattttcgacaaaccaattgtaccatttgtacaaacaatttccaccggttcacgaataatagattcaatctttcttctatctgatgtaccttctacaataatgactttttctacataaatcatatgtcatcacccgatcaccatatactatataaccttgaacttagtatatagtatattcgttattttcatgttgtttcctgtttatttttgcaaaagaaaagcggaagcggctcgtttagaacaggagggcattggaactcctgaactagaggcgccttttgcctcaagtgaaggagtgaaatgaccgactgttctagccgctggagctagacaacgaaaagcggaaccgactgtttagccctgttggctaaggttctttcgtacagaagacgctttttgtcttctcgtacggaaggttcttagacatgaagggctaggaggtggagctggacaatgaaaagcgcaagcggctcgtttagattgtgaagacttatgaaaccttaccacaaaacagtttttctcataatagcttatttatttacatataacttgaatttcattatttcacacaaaataaaaaaggacagcacaaaggctgtcctttagtcgactacaattagtcttggtttgtcatttctgcatatttttctgcagttaataacttctcaacttggcttgcatcagaaagttcaactttaaccatccatgcaccctcgtatggagattcgttaacaagttctggttggtcacttaattcttcgtttactgctacaactttaccgcttacaggtgcgtataactcagaaactgttttaacagattctacgcttccgaatggctcgtcagcttcgattgttgcacctacttcaggaagttcaacgaatacgatatcgcctagctcaccttgtgcaaagtgagtgataccgataacaacttcattaccttcagtttttacccattcgtgttcttcagagtaacgtaaattatttggaatgctcatgactgtacctccagtgaatgtattaattatgtaaaaataccttattggtactttttccacacactttcaaactgctcttcgttaaaaccaagtgttacattcgttccatctgttacaattggacgtttaatcaacatgccatcagatgctaaaagctcatacatttcgtcttcgcttgcatctttcaacttatcttttagaccaagttcacggtaacgcattccacttgtattaaagaatttttttaatggtaattcacttttttcatgtaaattacgtaaatcttcttttgatggtggattttcaacaatatgaatcatctcatatgctacatcgtttgcctcaaaccatttctttgccttttgacatgtgccacactttggatatgaataaaatgttactgtcataaattcacctacttttttactaacctttacctttatcatatagaaaacgttttgttatttcaaaccattattcgctaaacttttacttatttcgtgataatttttaataatcctgcgaatttttcttatttttccgccatttgttaagaaaaaaataaatatataaattttttagattctgcaccaaacatatatcttaaacaagcgtttgattaattctccatttttctttcttaacctttgaactacaggagtttcttcctaccgaacatacagcttaaacaaacgtttgattaattctccatttctctttgttaaccattgagttacatcagtttcttcctaccgaacatacagcttaaacaaacgtttgattaattctccatttctctttgttaaccattgagttacatcagtttcttcctaccgaacatacagcttaaacaaacgtttgattaattctccatttctctttgttaaccattgagttacatcagtttcttcctaccgaacatacagcttaaacaaacgtttgattaaaaaataagaagcctcgtttacaggctccctcatcatctattcaaataatctgcgatggtttgaaatacgacgatatacatattatgaatactttcttctgtatttccaccattagataaaccaattgcccattgttgcccttcaccacttccgatatttgcaaagccttgcgtatacatagcatttacatcttttcgtgcactgttatactctattccttttgtaataaaaattgaatatgatttatcttgtaaaccgataaaaaacactggtttctttagcgatgaaaatacatttttatactgctctgttgaggcttcttgaaagtgatctttcattattagaaaaccatccacttccttagatttcttttccagttcctctaacttcatttcttcaaactttacattcctaaacgtatctttcggcttttctccaacaactccaattacgagtgctcttccgttatattctaatttctctcctgctttatcctttgcacacccagcacctactaggcatatcaatataaaaaataagaaatacgataaacgcttcatttagcaccctctccttctttttagtcaagtgacaaaaacgtaaggttaattcaagaaaatgtaagtaaaatcgatagcccaattcacgtttctatattataatcaattgaatttacttacattactaaacataggagatcaacatgaagaaatttaaactttcatcttttcttccgttaagttatatacttctactcgtgctcgtaagtcccctttacgacgtattaaataaatcgactgttcacgcagtagacgttacaactgtagtagatgattggattccatttgtaaaagcatttattattccttatttactttggtttccatacttatacggcgcacttatttattactgctttgctgaccgaaagcaatattatgtcactttaagtagtgttatttttggaaagcttgcttgtttttctatttattatttttggcaaacaactgtaccgcgtccgactgtcgttggaacagatgtattttctgaactagttcgctatatttatagtatcgatcaacctgtaaactgtttccctagcattcacgttcttactacattcgtaattatgttagctgcctttaagcgtagagaacagcatgcttttgaatattacatccttactttcttcggtacacttattattttatcaacgctatttacgaagcagcatgcctttgtagatgccgtttctggaatgacgcttgcaagcatactttacttcggcgttcagctcttattggccaaagaaccgataagagttccagtaaaacaaaatcatagaatgtagcatgacaaaaaagcagactgtggcttctcagtctgcttttatctattagtaaggagattttcaacttaagattgcggtacagtcatatcaccagagtgaatacgacctgcttttttaagagcaatgtaaagtatataagaaacagctactggaatgacgatataagtaattaccatcgccgggagaacttcccatccttggctggaaattaaattaattggtgcgataagagaacttaatccaagacctgcaatttcctttcctgcttccagttggaaaattaatgcggatactggaccgactatagcactggcaacgacagttgggacgagaatcattggatttttagtgatatttggtaactgtactttcggagtacaaagtgcttgagctaatatgccacctaaattattttctttcgctgagatgacagagaatccgataaactgagcgacgcatccggcaagagcagcaccacctgcaacaccgtctaagctaagtgcaattgctaacgcagctgatgaagctggagagataagtaatagtccccaaacgactgcaatgacgatagaagcgatgaatgggctaccagctgagctatctttaataaacgttccaactgtatttaaaacaggagtaatattatgagataaccaaataccaactaaaccagaacctaatatggccgcaaatggaacgagcatcatatctaacgcagtttttccacttaaacgtttaccaatatatacagctaaagttgctgttaataatgcaccgattggctcacctgttttaataattagaccagcttcagtaattgaaatggatccggcaccaattgctccggctaccatcgctgagaagattacaagaccgtttgcaccgagcataaaagcaattccggcaccaattgccggtgccattagtgattttgcaacaactccgattgtaataagtaatggtatatcaacaattcttcctatattttcgatcagtaaaccaattccgagggatacgaaaataccttgtgcgattccagcagatgctttaaatacacgagacattatatattccttcatttgtttcaccttcttctataagttagtaaccaattgttttcatataatcacgtaaaatatcgtttgattttgcgaatcgagattcttcatcctctgttaaattgagttctacaacttctcttataccgtctctagtaataatagctggtactcctgtacaaatatcatattcaccatactcaccatctaaaatggctgatacagcaatgacacggtgatcatcattaaagattgaactcgcaatatatgctagagaatttccaattccgtaataagtagttcctttacgtttataaatttcccaaccagcttttgcagtcttctcaacaatttcatctaaatctatttcaccaaatcgttctttttgttcttctaaaatttgcagaattggctttccaccaacagttacatgagaccaagcaaccatttgagaatcaccatgttctcctaatgaatacccatgaatactacgagggtctacatgtagcatttcagataaaattgttcttaagcgagaagaatctagtgatgtaccagtaccgattacgcgatttctaggtaatccagataatttccacacttcatatgtaataatatcaactgggttcgatgcaagtaagaaaataccatcaaatccactttccattacgccgccaacaacactttccataatcttcgcactcgctcctaaagtatctaagcgactttgccctggttttggtgctggccctgctgtaataataacaatgtccatatctttgcagtcttcatagcttcctgcatatacttttgttcttgtatttgtaaagttaatgcaatgtgataaatccattgcttccccaactgcacgttcatgatttatatcaattaataatagctcttcacaaatcccttgatttacaatggaatacgcacaacttgatccaactaatccagtaccgataattgcaatttttcttgtatgtcttttcatagcaatctctcctaattgatcatataatctatttcttttgctctttacactcctaattataaaggttctcacgatagaaatcatggatactttgtgaaatattgagcaaatcgtttgtcctttttgtgaattgttatattccattttcgtcatatttgttacagctggaaaaatatttattatgtatttattgacatataaaaaagaagacgagcgaataaattcgctcgtcttctttttcctgttattccgcacttaattgactttttaattgctgcacaatcatcggattcgcaggtgctgccggtttgtaataacttttttgctttgcgtactcatacatattacgttggcgcatttcatcttgattacgaatttgaattaacgtttggtgtaactgttcattatcagactgagcaatataatttgcataacttgttaaacttgcatttaatcctgctaaataatcatttaccatatctttttcattcatgttccgcttcctcctatcctaggaaagtcattaattgctgtttcgtatttcgtgcatcttgcgcatccttttgtaacatttgtttcaattgtggatctgtacacgtctgtgcatactgctccaacttgttaataattgttgcgtgtccaccaattaaatgacgtaagttttctacttcaagctctgttaaattttgcatggaatactcctacctttcttctttcattctcctttagtattctgttctttttaaatcgtattcatgaaaaagctttcttacatttcaaatcaatcacatctatttataaatacaaaaaaatgttataattacagaaaaatacaaatattcaaaagctaaccttataataacagtataatcctcaaacaaaccatggtaggaaggtgtgctcatgcaaaaatatgttaaagttatcttctttatcatttacgcaatcctctatgtaaaactgttgattgatatattaaatttaaagccgttattcacttctatagctttacatatgttatttctcatttgctttctatttatagcacttaacaattataaaaatcgtaacactacatttttcctattgtttattagtgcaactctattagtaagtattagcttcattaaaagtattcttatataaaggagcaataaacatgaaaacacatgacttccttacagaaatccagaagggctctgagcctagtccctatcaagaccccatcgtattcagtttcgtttgctttttcttagcgatatatacatttttcaaacctgcaaaataatatcatttcataagaaaaagcctaccattcttttcgaatcatatgcacaaaaaaaccttagaatcacttctaaggtttttgtttgctttgcttcttattcacgtaatcctttaataaacgtttccaacaatacatgtaaactcgtatctaaatctagcggcaaaccaaatcccccttgctgttcaatcgacgcaaatccatgacaaatacttctgaatccgcgtgtcgcatgaagtgcattctctccttctaagccatactgttgtaatacttgaagacaaagctttacaattccgtcacctgcttttcttacttcttcatctcgtaaaaaagttgcttcatatagtccaggatgttttcggacaaatgctacatacgcttctcctaatgcatgaattgcttcgtccgtatatttaccctcagtagcttcttctagtctgttatgcagctgtttgattccgtaaataccaagatttttccgtacatcttgtaacccttttacatgattatatagtgagggcgaacgtatccctaacctttgcgctaatgaagctaacgttacttcttgtattccatttgtatctgcaatttctgccgctgtttctacaattttttgtaatgtaagtccgattctcggtgacataaattacccctctttcttactttctatattccgcttagcttccttaatagcaagttttatgacagtgtctggattctttatcattttcccatgtcctgccgcaagtaaggaaggctcatattcgcttaacttctctgcactttgtaatgatatttctttgctccacgttgccatcgcaggaaacggaaaccaaaatttcatttgtcccgaaacagccatacctcctcttgtttggaatgcatccccaacaataagagctttattccgtacatcaagaaacgacatggatcctggtgtatgtcccggtgtcataattgcaagaagcgatccaactcggtcgccatcttctaataaaacatcaggtaccgtttttacttttttaggtacaccgccttttatcggtatattcggttcatccttttgtaacgtcgtatctccttctaacagctttgcgtcccgcttagaaatatagactggaacatgaggaagtacttcctttaatgcatctaatgcaccgatgtgatcatcatgcgcatgtgttaatacaattttagtaattggttttcctattttctcagccgcctgtaaaataccttttgcgctatatggcaaagccgcatcaattaaagttaaaccatcttcttcctctacaaagtaacaatttacaggaaacgctcttggcaaaaatgacaattgatataacgttttttcatgtatcatcctcatagtcccatctcccttttcacgaaaactaatgccattagttttattatactaatagcattagttttataccactaaaaaatttctttttttcaaaaaaaagaacagtagccgtataaacgactactgttctttaaagatattaaactgtataacgctcatcttctaaaattttcgcagcgatttcacgtttcttcggaattacgttaagtggtgtgtggcgagttaatttacgtaatgatgataacatcatgcgcagcatgtcgccattttcaactgcgataagtgtttctttcgcatctgcttcgatttcgttgaatgcttcttggcagaatacttcagtgtataacactttttgtttattcttttcaagaccagttgttttaattgctttttctgtacgaagaacagctgactccattgcgtataggttgcttacgatgtcagcgatattcacaagaatttcttgctctttatctaatgctttaccgtatttttgagccgctaatccagctaccattaagccgattttcttcgcattagttactaaatacttttgaagtgctaatggctcatcgcctacttcttctggcatcatcatcattaactcttcttgtaatttttgtgctttttgaagaagtggtaattcacctttcatcgctttacgtaagaacgtacctggtacaattaggcggttaatttcgttcgttccttcgaaaatacggttaatacgagaatcacggtacattctttcaatctcgtattctgccataaatccgtaaccaccgtgaatttgaacaccttcatctactgtatagtctaatacttcagaaccaaatactttgtttaaagagcactcgattgcatattcagcgatagaagctgctactgctttaccatcttttacttcttcttcagataatgtgctcatgcggctttcgaataaacctactgtacgatatacagagctttcagctgcatatgtttttgctgccatattcgcaagtttctcttgaattaatgggaagcgagcgattggttgtttgaactgttgacgttggtttgcatattgtgctgaaatttctactgcacgtttcgcagatccaactgtaccaacacctaatttataacgaccgatatttaaaatgttgaatgcgataatatgacctttaccgatttcgccaagtaagttttctttcggtactaacgcatcttctaaaattaacgtacgagttgaagaacatttaatacccattttcttttcttctgggcttgtagatacgccagcgtagtctttctctacgataaatgctgagaagtgctcgccatctatttttgcatatacaacgaatacgtcagcgaatgcagagtttgtaatccactgtttttcaccgtttaatacataatgtgtaccttctgcatttaaacgtgcagttgtttttgcgcctaatgcgtcagatcctgaacctggctctgttaatgcgtatgcagctaatttttcaccagttgcaagtaatggtaaatactttttcttttgctcttcgttaccgaataatacgattggtaaagatccgatacctacgtgagcaccgtgagtaattgcaaaaccaccagcgcgagagaatttctctgcgattaacgctgagcttactttatcaagaccaattccgccgtactcttctggtacgtcagcgcctaataaaccaagttctccagcttcttttaaaagacgaactgaacgatcaaactcatgttgctctaaatattcaagctctggaagaacttcatttacgataaagtcctctgtcgttttagcaatcattttatgctcagatgaaaaatcttctggcgtaaacacttgatcaatcgtaatctcatctactaaaaagctaccgcctttaaccgcatttcctactgttttttccatgaaaatttcctccttcatattttcatgagccgcttctctctttttgaaagaagctggctctcccttttgtttttataaacctttgttgcttccatttttttttataatccagttccagcggctagaatgttcggtggcttcgcttcttcctacgaggcaaagagcgcctctacgtctgaagctccatccccctcacattctgaacaagccgcttccactttttttcataatccagttccagtggctaaaacagtcggtcgtttcaccccttcctgtgaggcaaaaagcgcctcttcgtcaaggcttccaacgccctcctgttctaaacgagccacctgcactttttaaagtaattcaaatactcccgctgctcccattccgccgccgatacacattgttacgataccaaattgttcgttgcggcgtttcatttcgtgaataagagatagtgttagttttgctcctgtacagccaagtggatgtccaagtgcgattgcaccaccgtttacgtttactttttcttcatctaaaccaagttcacgaataacttgaatggattgagaagcaaatgcttcatttagttcgaataagccaatatcagataactctaagccagctagttttaacgcttttggaattgcagcgattgggccgattcccattacttctggtggtacgccagctactgcaaatgaacggaatttcgcaagtggcttcatgccatcgctcactgctttttcgcgatccattaataatacagatgctgcaccatcactcatttgtgaagagttaccagccgttacagaaccgcgaacgttaaatgctggacgtaattttcctaaaatgtctagtgtcgtctctgctcttacaccttcgtcttgtgcgaaagtgattgtttcttcttgaagtttattgtttgatccaaccgagcgtaacgtcacatctacaggtactgtttcatcagcaaagtttcctgcagctaatgctttcgcagcacgttgatgacttcttactgcaaatgcatcttgctcttcacgagaaattccatatttcacagcaacttgctctgctgtatgtcccatacccatataatattctggagccgcttctacaaggcgactattcggacgaacaacgtgtcccatcattggaactaaactcattgattctgctccgcctgataatacagcttcagagtgaccaagcataatacgctcagctccgtaagcgatactttgtaaacctgaagaacagtaacggttaatcgtaatagctggaacatcgtaagaaagtcctgctaatccgccgatattacgagccatatttaaaccttgctctgcttctggcatcgcacaaccgaaaattaaatcatcgattggtccttcataattcgcacgctttaacgtttcctttactactaacgcccctagatcgtcaggacgaactgtttttaatgaacccctctttgcttttccaattggtgttcttgctcccgcaacaatgacagcttctctcatgaacgatatctcccctcgttattagttacgtaatggctttccttttacaagcatgtgctgcattcttgcttgtgatttcatctcacttactaagctaataaatgcttcacgttctacatctaataaatattgctcatcaacctctgttccgtacggcacttttccgcccgcaatgacatatgcaagtttcttagcaatgtgaagatcgtactctgaaatgtaaccagataaatgcattgcttccgcaccaagtgcaagagttgcatatcctgtttccccaacaactggtatctttttacggatcggcgctttataaccagcttcatataaagcaagtgctttctgtttcgcatcgtatagtaagtgatcaccattcacactaataccatctttatcacctaagaagttatgagaaactgcttcttgtcctgaagttgaaactttcgccattgcgactgtttcgaacactttatttgcaactttttgcagatcaaactctacaccgtttgccattttgtttaagtgtttaatgtatagctctttattaccgcctccgccagggattaagccaacaccaacttctactaagcccatatacgtttcactagaagcttgaatgctcgctgctggtaagcaaacttctgtacctccgccaagcgtcataccatatggtgctgctacaactggcttagaagagtacttaattttcgtcattgcatcttggaagtttttcacaacccactcaatttcaaagtagttgtcgtcttgtgcttccattaagatcattgctaggttcgcaccaacgcagaagttcttcgattggttaccgataacaagacctttataattcttttctacttcatcaacagcgtagttaatcatttgcgtaatatccataccgattgcattgctcttcgaatggaactctaagcaaaggatgccgtcgcctaaatcaattaagctcgctccgctatttttctttaatacaccattttttgcttttaattgcttaagagaaattgcttttttattacgctcgattagcttatattcgccattatcgtaatagtagctatcgccgttatcatgtttatagaaagtagtgaaacctttctctaacatttctttcacccaagtaggaacaactacgccgttttcttccatcttttgaacagatttttcaacgccgattgcatcccacacttcaaatggcccttgctcccagccgaagccccacttcatcgcttggtcaattgcaacgatatcgtcagcaatttctttatgaagttttgcagagtataaaagagttggtgtaatgatgttccataataactctcctgcacggtctttcgcgtatacaagcgctttcaatttattcgctaatcctttttcttgtttacttaactctacggatgcagcttttaattttttacgcgcttcgtattccatcgtttcaggatttaattctaaaatttcttttccttgttttaagaagaagccttgccccgttttacttccaagccattttttctcaagcatgtcatgcatgaaagctggtactttaaatacatcacgctcttcttcttgcacattttcatatacgttatttgcaacgtgtacgaatgtatctaaaccgacaacatctaatgtgcggaacgttgcgctcttcggacgaccaataagtgggcctgttacagaatcaacttccccaatgctatagccgcgttttaccatctcttgaagagtaacaagtaaaccatacgtaccgatgcggtttccaataaagtttggtgtatcttttgcgataacaacgccttttccaagaacgtcttcgccaaatagtttcatgaagcttaatacttgtggatctgtttctttcgtcggtattacctctagaagttttaaatatcgtggtgggttaaaaaagtgtgtgcctaagaagtgtttctggaagtcgtctgaacgaccttctgccattttttcaactgaaatgcctgacgtattcgagcttacaattgagcccggtttacgaacagcgtctactttttcaaataatttctttttaatatctaagttttcaactactacttcaataatccaatctacatcagctagacgctcaagatcatcttctaagttacctgcttcaatcagtgctagatttcctttcactgtcagaggagctggtttttgctttaatagtttttgcacagccgtattactaaaacgatttctcacacttttatgttctaatgtaagtcccttcgcttcttcttcttttgtaagcgcaggtggtacaatatcaagcaataatgtcggaataccaatattagctaagtgtgccgcaattcccgaacccattacgcctgaacctagaacagcagcctttttaatttggaacatccaattctccccctattcttgaatgaatgctcattcaatttttcgacataagtcgcaatcaatgagtgagcctctactaataaatatatgatactgtttaaattttcgcaatatatttattgataaaattttctgaaataaatatttttctttcatttggccatgctatatatgtattttcttcactaaaatacactttccctttttataatctgacgaaactggaggaatatatatggcaaaacttaagaagaacccttcaaaggctggaattagtgcagctagtgtaactggaaatgcaggtccgcataaccacggcgtggaaaaaggacgtcaaggtaataaccaacaatataaaaagcataatatgggcgaaaaataacgctatatttttgggcagagaacgtggcataatgattaatggctgctttttctgcccaatttatttgtaacaaatgagggaattataatgaaacgaacaatagttatgattgtaatgattgctacactatttacagggatgattttcttctcttatgcacaaagacaacaagctgtaagagctgatcaacccaacattactgggcaatacggagttacaatcgatgcagacacaggtgaaattttgtatgggaaacgtgaagacgaacgctcttatccggctagtatagccaaaatgatgacaacccttcttttactagagaatgtaaaagaagatgaagaaattacagttacagaaaacgcaattaaaacagaaagtcaaagcaagaaaattaaacttcgtgctggagaaaaattaaagcgtgatgaggcattaaaacttatgcttatcattagtgcagatccaatagctgaatccatcgcagaacatattgcaggatcaaaaaatgaatttgtaaaaatgatgaatgctagagcgaaggaacttggtacaaagcatgcgactttcaaaaacgcaagtggtgctgatgcacttggaaataaagtatcgccatatgacattgctattattacgaaagaagcattaaagtatccagttgttttagaatatatgaattcaacgcgtacaactctacatacttcagaacgctctccaaacatcgcaaactacggacgagaagaactatatgacgatccatatgcgattggaagtaaaagcggtctatcagcacttggcaaatatacagtcgtaacagtggatgaaaaagacggtaaacgtgtcattaatgttgtattatcttctacccgcaagcaactgtatcctgatacgaagaaaatggcacattatgcatttcagcaattaaaataaccaaggagtattttctccttggttattttttaaccataccttttaatacgaacgcaacgtttgctggacgctctgctagacgacgcatgaaatatccataccagtcgtttccataaggtacgtaaacacgcattttgtagccttcttttactagctcaagttgacgctcattacgaataccatataacatttggaattcaaattgatcccttggaatgttgtgttcttcagcaagtttttttgtatattcaataatcgcttcgtcatgtgaagcaattgcagtataatttccatttaataagtgcattttaataatttttttataattgtcatctacatctttcttgtctgggaacgccacttcttcaggttctttataagcaccttttacaagacgtaaattcggattataagcatttaaatcttcaatatctttttctgtacgatataggtaagcttgaataacagtaccaatattatcgtattcagattttaattgtttaaagatatcaattgttttaccacagcgtgtatagtcttccatatcaatggtaacgaacacaccattttctttcgccgcttctaaaatacggcgcatattgttcattacgatttcatcagagatatctaatcccatagaagtcatctttaaagaaagctgcgaatcaagaccttctcttccaattgcacggatcgcttcaatcgattggttagccatttcatttgcttccgcttcattatcaacgaattcccctaaataatcgattgttacacaaagtccttgcttgttcaattgtttaatagctgctgtcgctaattcaattgtctcccctgcgacaaagcgacctgcaccaaagcgtaaaccgtactttttagccagttttgttagcgctttattttttgacaagaaaagaaacgaatttcgcattaattgttccatgtaattcacccctatgactgtaatttatctgttttttacccctcttcaaaattatatcattgtttaaaattattggatacaaataattatttagataatttataaaatactataaaaacatttaaaaccctatattttcgcttataaatataactgaaatatttttcgacatttagaaaaatggagtttaataggcataaaataggcatgtcgaaaatattcgacatgcctataaaaccctttatattccatgtaaattatataaggatattaatacagaaaacttacgattatatttccctcaagtttttttattgctcatttcgcttctcttcattcagccttttaatatctgtaattaactgcaccatctcttctttcgcatctggataagtttcattccaatgctttactaaagctggcatcgtcttagctatgtaagaatacagtgcccacttctgtacctgttcttttctctcttcattgctctctccaagtaacagctcagtgtatttctccagtaaaccatcaaactgctcgttaaacttttcactcattttatttaccccctatatgaaaaaagcagcgaaaatcgctgcttttctttataattttgatcgaacagagtttaattttttctccattgtgcttactttatcacgacgatcatcaatacgaatagttgttgcaacacgctgtgcacctttcgtatatggaacttcatgcatttgttgaattacttctagaatgacaggaagatctccttcaataattgtattcatcggtgttaattgatacttcacgcgatccgcatttttctctagcaccttttgtacttctgctacatattcactaacacttggattacctgttcctactggaataatcgatacatcaacaattgccatagtagtcttcctcctataatcgtttcttatatatccattgtctattttaccgaaatcctcatcattttactaatatgttactcttccactttaaactgctcgactaatctttctaaatctctcatatgttctgtcaaactttccatcgtgtgagctaccttttctaaatgattcacctgtgattccgttgcagcatgtacctcttcagaaacagctgcactttcttgactcgtaccagcaattgtatgcattaccgctgtaatttccccttgctcgtaacctatgttatgtacctcttctacaattttttcaactgaagtactaatcgtatttacaactgacataattgtgcggaactccatttccgcctctgtcgtcactttattttgtacatctgcaatgtctttcaatttacttacaacttctacaaccctttttacttctaattgtacatcaccaatcatcgttgtgatttctccggttgcctcttttgattgttccgctaatttccgaacctcttcagcaacaaccgcaaatcccttaccttgctcacctgcacgggcagcttcaatcgatgcatttaaagcaagtaaatttgtttgatccgaaatgccttttataagctcaacaacattttgaatcgatccaactctttgttctaacttatccgatgcttcttctgtatgaacaacaatcgaagatgattgtcccctcgtacggattaaattcctcattgtatttaatccttgcttagatgcctcttccgctttgccagctactccttttatttcaccaacggagctattcatttgttccactgactccgccatattctcgagctgagctgaaacttcatccacaccattcgcaagagtagaggctcctccactcacatcatccattgctcctgaaacttctctactagccgctactgtttcattcgttaagtaatgtaaactattcgttgattgttgcaccgttgatacgctgtttttaattttacttaccatttcattcatttgttcaaccatatcattaaagtgcttagtcaactctccaacttcatctttacttgtcactttcattcgcaacgttaaatcgccttctgctactttttgcacgtgattctttaatagttgcagtggtcttgctaatcttcttgagaacaagtaggaagctacgattccaactaataaactaatacatgccattataataactgtatttctcgtactatttaatagcccatcgattgtttctttcggataaaagattcctatcgtccatttcatcgtatcaaatgattgactgtaaacaactacatcttcaccttttattgtactgaccgcatattttgttacctctttatttaagctctttataagcggctctttagaaacatctttccctatcttttctggataaacaagagccatatttttatcatttataataaacatttctccgtcattattgtattgaatattgtgaagcaacttctgaatcgtcccaagcgatacatccatcgcaacaacgcctaatacagatccatcttgagctgtaattgctttagaaacacctacacttaactttcctgttgcaatttcataagaaggttgtccccagtggaccttttttacatcagcctctgaatctttataccatggtcttgtcgttggatcgtatccttctggcacttgcccaccttcagcaagattggcacttaatgtttttttatctttcgtaccaatatataaatctaaaataccaggatgattctttttatactctgcaaactctttcgttaaaaacgcttcctcttctggagtaaccccaccttgaagtatattacgaatcatctcactgttcgcgtaataccccatatcttcatccgttctttgaacaaatgtcgtaagttgctctgtcacaagatccatcgcattttgagaatactcgtctaaggaacgcacttccttttctttctgtaattgatacacagctgtacccaatattacgaacatcatagaaataagtactgaaaacactaccgcaatttttaaacgtaaacttcttaacatcttccccccagcatccccttcgcattaaattaaaatcttattaatcattatattaagtataatagataaaattaaaaaattgaaattaattctcaccttaatacaattagaaaacggactaccacttgtgcaaaaacaaatagttcattatccttaaaatataatctcattcgttcggagggaactatgttacaaaaattcggtttctcacaatatgaaagccaagcttatgaagttgtcgtatcaagcaatgaaccattagatgctacaacgattgtgaagcattcaggtgttccaaaagcaaaaatatatgaagtgctagcacgcctaatcgataaaggaatggtaatggattctgtttcagaaaagaaaaaactgtatacagcattaccactaaagctagcaattgaaaaattaacgacagaattccaatcaaatattaaagaactggaaacaaatatatcaaaaaaatcatttacagatgaccgtgtgtggagcttaaaaatgcaatcttctattcgagttcaaagtaaggaactcattgaaagtgcaaaagaatcaatccgtatttcagcttggaatgatactcttttagaatatcttcctttactagaacaaaaagcaaaacaaggtgttcaaattgaatcccttattgttggagaagtagaaacagacttagaaaacatgcattttctaatcccagctgaagaacctaatgcattagagcgctacttgctactcatcgttgacgatcgtgaaattttatttgctggcgtagaacaagagtcatggcaagcaatgaaaacaatgtcacaaccattcgtaaagttctttacagaatttttctatcatgacgttgcacttgcaaagattacccagaaacaccatgacctctttatggaagatgaggaaattaagagtttgttaatgaaattaagatactaattaaataataaaaaggagtctagtttttcacttagactccttttcgttttgttcctttatctccatcaacagctcaatgattttctcattttgctctacttgtttctctgaatttttatagatgaaacgaacccatctaagtgcaagaataataagaaacaaagggagcattgaaattagaagaccaataattgaaaaattcgtatacatatacatcacctcgctacatacaaattctccacctttctactaaaacctgcgattttttacaaataaaaaaagaacctatcaaacgatagattcttctttcacgaactgagtagagcgtcctctcgtaatcgagaaaatcgcgcaaagcagtgctaatacaataaagccaccgcctacccaagcattatatataacagatgatttttcgataacaactccgcctactgttgaaccaagtgcaattcctaagtgaagggcagagttatttaaactttgctgaataccagctgattctggtgcaatttcaattaaatagttttgttgcgctggtgaaatcgcccagctcagcatactccaaagtcccatcataatgatgaagagtgggaatgagaatgtcattaatggcagtatgaagattgcacacgcaaatacgataatgatggaaataatacttttcttcgatccccatttatcagcaagccagccaccgaatccgccaccaattactgctgcgattccgaaaataaagtaaaacacactaatccagtttgcttcaacatacatgacatcttttaaaaacggtgttaaatatgcatacaatgttaaatgccctgttaaaaacaaaaatgatgttaactgtgcacttacaatttttttatcttttaaagtagcaagttgttcttttattgataataccgatgtcggtggtactttcgttaagaataatgaaatacaagcaattgccataactgttaataccgcaattaatacaaatggtgcacgccatccgtatgcatttccgagcacaagaccgagcggtactccaagtacgagtgatccgctaattcccatgaaaatgattccaattgcacgcgcacgaaaatgcggttctacaacactagaagcaagtgttaccgatagtgcaataattaatgaaccactcgccgcacaaataacccttgagaacattagcattccgtaattcacactaaatgccgaaataatatttccgattaagaaaatcgataatgctccaacatacaatgtttttctttcaaacttccctgtcaaagctaataaaactggacctgacaaagcaaatactaccgaaaatattgttataagctgaccagctgcgctaatagatactcctaaatcattggcaactaaatcgagcgttcctcctataattagctcaaccgttccgactacaaaagccgcgatagctaaaatataaacacgaaaattcaagtctttccccacgctttctattttggttactacgactatagtaaccaaaatagaaaatggaagcaagtacaatttttttacagtaaaaaaggtaggcgtataatacgcctaccttttcatcattctgtttctttcttcttatttaaataccaatacaccggaagtcccgtaaatacaattccaatcgataagaaacaacttactggatcgttaataatcgcactaccaattacaaaaaacgaacctaaaatcgctacgattggtacgattgggaataacggtacactatatgcacgctctttattcttattacgttttcttaaaatgaagacaccaataaacgtcattacatagaaaatataaataatgaatacggaaatctcagatagcttatttggatcactaataatcattaaaataattcctaaaatgatttcaacagtaatcgcatttgctggtgttttaaatctcggactttcctttgcaataaacttagaaaatggaagttgtccacgctctgccatagacattgggatacgtgggaacgttaaaatctttccatttaaacagccgaaaatagaaacgataataccgatactaataatttttccgccatattctccaagtaacatgcctgcagctgtcgctgttgcattttctccaaggtctacaattttcgctgctggtaatacatttaataatgccaagttaattaatacgtaagcagccgttacgattaaaatccctactgtcattgctttcggtaataactttgttggattcttcatttctccaccaatcgaagcaagtaaaatccagccgtcataagcaaataacgttgctaaaattgccataccgatactttgattttccgatatcggcacaactacgttaaaaatatcgctattccctttccagaaacctagcacaacaattaacacaatcggaatcatcttcccaattgtcgtgattgtttgaacgatacctccgtattttgttcccatactatttacaacgccaaggaacacaaccgttccaattgcgattggtaaattccacactttatctaaatagaaaaaattaatcactaaagaactaaagtataaacctaatgttccgataatagcaggtccataaacaattgtttgcatccaacctgataaatatccccaaaaacttccgtaaatctcctctaaatacgtatacaacccaccatttttcgggatttgcgctccaatttcagctactgttaaaccacttgctagcgtcaacagaccaccaattacccaagcaagaatggccatattagaactccccgagtaatctaatacgctccctggtttcataaacacaccagatccaataatcgttcctactacgatagaaagtgctactgttaaaccaattttgttcttctcatcatgatgcatgctgcgtatcctccttccaatcctagtgtgatgcaaaaatgaaataaaaaaacactcctccctaaaaaagggacgagtgttgtattcgtggttccacccttgtttcaattcgtaaagtaacacacttcaccaatttctcaagtctaaataacggtttttgccggcaagcaattactagatgctcgttcactgctgcagttcagaggtggtaatctatttttccgtattaggaagctcacagccaaaggcttccctctctgagaatcgtaaaaaattgatcgtgtcctcatcatcacttcttgatgtcgaattttgtagttattgttcattatattgaattgttagaaaaaatcaatatattttttatataacataggaaatatttatcttcttatattataacagaagctgtaatatttctctaattccctcgtatctttggagcagtgtagctgtaaaaattatatcagcgatttttcaaatatatcgatttaccaacaaaaaacgccaacaataaaaggaggtctttcaaaagaaagcccccacacgaaagatacgacttcattcaattatttctcatcttttttcataaaaaacttatggtgcggtaaatcaacattcaatgcctctaattgtttcttttcattgtctaaaatcgcttttgcttttgtttttgttgcttcatctaatcctgcaaagatgtcttcatgcttctctttctctggaagtttcacacctaattttgttaattcttcttttgcttgctcatgcgttaattttccagatttcttttgctctaaaattgactttgcttttgcttttgcctgttcatctaagttagcaaacatgtctccatgtttacctttctccggcattttcacgcctagctttgttaattcctcttttgcttgctcatgcgttaattttccagatttcttttgctctaaaatcgacttcgctttctctttcgcctgctcatctaagttagcaaacatgtctccacgcttacctttctccggcatttttacgcctaactttgttaattcctcttttgcttgttcacgtgttagttttccggatttctcttgctctaaaattgacttcgctttttctttcgcctgttcatctaatcctgcaaacatgtctttacgcttctctttctccggaagctttacacctagttcctgtaactgtttctttgtatcgtccataatcgtttttactttttgttttgtagcgtcatctaaatcttttttcactgtttttgtcgcttgctcagctgttggagtatttgttgccgcgaatgccggaacaccgactcctccaatgattccgaatgataaagcacctgcaatcgctaaataaccaactgttttcttcttcataggaaatttcctccttcatatttctaaagcatgtacactttcgtatacaacgccaatagtaatattggtttcttaaaatttccttaacgattcaaataaaaaacaccgctcgtaatgagcggtgtttctctatgctttttgtaattgtaactcttcacgttccattatttttcttaatacaattgtttgtgtcattgtaaataagttacctgttatccagtacaacacaagtcctgatggcgccgcaaaccccataaatagaatcattgctggcatcataatttgctgcatctttagcatctgtacttgttctccaggtgtaatattcgattggaaaactttcatctgaataaatgtcgttaacgctgcaataatcggtaatatatgatatggatctgcatgtcctaggttcacccataaaaacgaagatgtgcgaatctcttccgttctgctaatcgcataatacaaagcagagaaaatcggcatttgtataaaaattggccagcaaccagcaagtggattccaaccgcctgatttcattagttctgacatttctttttgatactgcttttgtttttcaaggtctttgcttacatcaccgtattttttctttagcttctgcaattcaggttgcattttcttcattttcgcttggctgcgatattgcgaaacagctaatggaatcatggctgaacgaataacgagcgtcataataatgatagcaaccccgaagctagctcccggtatatgatgagcaacaaattgaatcatatacgagattggatatacgaaataatggttccatattcccgtactatgtgaatcaattgtgcctgcattactgcagccggataaaacaaaaacaagtactactgataaactaatgagcgcagctcggtatgattttaacatgttcattcctccaatgtttcgtaattatttagcgaaacattggtgtatacggaccaacctcatcattctcttcacttgattcttgtctgcgtacggaacgaatcattccatatttataaaaaattgaaaatagcggtacatttcccgcactatcttcacatgtatcaactaacgcaaaagctctttgtctaccgcttgatgcttgttgacgcacaaagcgagaaacattagcaaggaagaaaacttctaataagcaaagtgctgtcgttacaaacgatatatatagaattgcatcctgcaataaaaattccatcgcttcacatccttaataaggtcattttagcacatcgggcaaatattctctatttccttttattttcaaaaaaagtattttgcatattttctcaagaaaacaataattaagaaacgttgtattcgctttctttagcatattcacacacatcaatgaataggcttgatttattagaaatttataaaatttttgcattataataaaactattgccagtttttgaaaaaacctttattctcttcttgtaatcaaaaatgaatatggagatgaaacatactatgggtcaactaggagacgccgattacgttcccgacaccgcctttttatccttcccagcagctaaaacatttcacttagaatttatgatacagttggttgttatttttatagcttctattttgtatgcaatttctatgaatatgttttttatcccgcataatatgattagcggtggattcgctggtgtagggatgattatcggttatttaatgcactacaatatcggtgcacttatctttttactaaacattcctcttcttattttaagtcacttttacttaggaaagaagacaacctttttaacagcgtactttgtagctgtgtcatcgttagcgatgaacattatcccggtacaccaagtttcagacgatattttactttcttctgtattcggtggtgttatctgcggagcagcttcaggaattatattccgatttgcttcttcaacaggtggttttgatgttgtcggattgattgtagcgaaatatcgagatgtttcaattggagcaatcatatttgtattcaacttaatcttacttgtagcagcaggttttattttcggatgggatattacactttatacgttaattagtcgatttgtagtcagcaaagttatcgacgctgtgcatacgaaacatattaaattaacgataatgactattacagaaaaaggcgaggaaataaaaagcgcactactacatcacggcatacgcggggtgacaatggtagacgctgtcggcggctatacaaaccataagaaaaaaatgatttacactgtcgtgactcgctatgagttaggcgaaatgaaacgtattatccgtcaagtggataacaaagcatttatgaacattactgaaacagttgaaattgtcggccgtttcaaacgcatataaaacaggttaataaattaaagggcataacatattagtcatatataatatgttatgccctttgttattcaactaacgtaccttttagcataataaaatcactaagtttattactacaaatcggaggatagcattccatatacaatactatctgtccattcctctttattccaaaaatcttgtatgaaatgggcttcctttctcatgcctattcgttcacacaatttttgtgaagctgtattacgtgcatcaagattagcctgtatacgatgtacattacattcattaaataatttcaataccaaactacttactgcttctgttgccaaacctctcccagctacttcctttgcaaaactataaccaatctcaacagtgtctttcatatttgtgtaccatacggataaatcaccaactactttagttttgtatataactgccaaacttaatattgtttctttagtaagtacattatttgctagcttcttattaaatcttttctgcatgtcttcatgagtccacttattatgtaataggaacttacatgtatcatcactattataaatagcaaatacatcctgtaaatcagtactcttaaaaggtctaattattaatctttctgttgtgaactccaagttagctctcctcccttacattcatgctataaaacattttttatagtatttaagcctcattcttagatctcaccttgattacatatttcatcataataaattaaaatccttcttccactaaactgcaccgttaatggtatttccttacgctttttattttttacacttattacaaaatcagataattctattattatgtccctaaatgtgttataatgaaagcagactcacaaaaaaaagagtatatagacttggaagtttctcttattttacaagcaaaaagaaacgagcagtcgggtatatttcagacaccatacacgtaacggtttaaacaaccgatcatcttagttactcttcaatgatctttttataaaaagatacgtacaattaaaactcacttcaatatactatacctacctttttgacttccaaatcatcttattacatagggagatgaacatatgaatcaatatatacgatatacaatagctgtcctgtttgctattatcggcggaacaatctgcttctggacaaacactcagcttggagagaatatcatctttaatggaatcgaaacgcttgtaagcgcttcaattttaggcggatacatttacttcctcttcaatccagaagaaaatgctcaaaaaacaatgttattaacaatgatcggaatcgttggtggatgtatttcctactcaatgacaaactatacattaccacttcaattaagctcagctttcttccacggtctatggacttggttcattgcattctgcctagcagacgtattcaacctattacaagacactgaagaagatagcggtcgtcaaattgaaagtaactcttaagctggaagatactcttccagcttttttatgttggtttgcataccccgcatcacgataaaaagaagttgccctcacggcaacttctttctcacataccccatccagtaccaaccggattatatcagcgattctccatatatatcggcgatttctccacttatatcagcgattttttcattatatcgaccgttcgacacaggctatcgacttaccggcaattttcggcaacctatttatgctctataccctgccactacaataaaaagaagctacccaacggcaacttcttttccacataccccacttcgtattcactaaaatatatcaacgatttttcaaatatatcgatcatttctccacttatatcaacgattttttcattatatcaacggttcaacacaagatatcgatttaacgacaaccttcgacactcgaaacgcacaacataccctatcccccaagcaacttactgccgaactctacgattaaaaagataattaataggatcgcgagtatctttaatgctacatatgccactttaaaaacaacataaatgagcaagactatcaaaataattgataaaatttccatatttacttcctccaagctttgctcttcttatctcattttactcgccccggactatttatggaacggcataagatgacatagaaaaaagaggatacctcacccatcgtaagataccctcaccttcaactgctcaaaccattctctttctaattgtaaatatcccatctcactcttctcggcgctctttaattctttatcagctttcttcatataagtatgggaagcttctagatcattctctaaatatttgataattccttgtgtacgataatatccgtttaagtccatttttgtaatagcctttgcatgttcctttgcttcttgcaaagaaagactatccatctgataaagggctttatataaaagataccaactatgaaaactgctaacgaaaaacttattttctttcgttacaggtagttgaacaattctttctatatacggtatcgctctttccattccctcttgatctgcacgagcaaaaaagacaagcataagtctactcattatctctcttatccctttattgtcttttattttctcctcactcaattctactaatctttcatcccaatctttcggtcttttataactaaataactcactcgatatttgaatctcatataaatgatttctagctctttcatcatctttaattaaaataagaaattgcatcccatcactcataagcgttccttttatcggcacaattgtaaccgcaaagattgcaaaatggaaaaaggaaaaatataaaagatattgataataactcaccatgtatatgtaaccggaagtaataccaaacagtaaactcgtaattggtccacctaaagtgagccacgcccattttttcgaaagattcggtgtctctatagaaggtggtactagtgttgcaacgcctccaaagtaagcccataatttatttgctcgaatgcgtaattttcccttttctttttgaatagtaatgggtcctactgtcataaatttaaatgttaaaccacctattacaccaaatactacatgtcctagctcatgaatggctaacactaataatgaaattccaactattgcccataggttcaaaattacttctaatttcccagttcggattactccgtataaaatggacagcattaacgccactgtcattgaaccagctggccttcttaaaatatccacctttttctccccttaataaatcattttcctttgcatttcgtacatgaacttcccaagatgcaatatccaaataaatgagattaagccaattaatacaaaatcgatattactagcagctgtatatataacggcagcccaccatacatatgccaatattgtattcttaaattcatatgctttatatccagcctcatgcacaatgtgctttaatccttcatctgcgtttttcgtccacattttcatagattccatatacgttacaccttgttcaggatatagcttattataacgattttttgttatgagtccgataattactacagtagttaaacaaacaatagaagctactaaattccacaccgcaaatgaaacatttgtatcctgcaacagtgcacgtctacatgtaataactgcatatacaaaccatgcctgcgtcactatatcacctacacgtaaatatatacttataatgcctaattttctgccttgtacgctctcttcttcatcgcgtgcctctgctaacatacgtgtattcttccaagtatagtacatcattaaaattccaaaaatagtacatatacctataaatgtattggatgataattttctcggttcatccgagagtaaatttaaagctatataagacgttaaaaatcctcctatcatacttaatgctattttccccacagaatcaaattgtttttttctcttactcttcatcgtcctcttccccctctactaacgtaaatatttcctccaccggtacattgaaaatttgtgcgatttttaacgacaatacgatagatggtgcataatccccacgctcaattaaactaatcgtttgccgtgatgatccaatcgctttccctaaatccccttgtgataaacgatgctttgctcgcaattccctcactcgattttgaagcttcatgtcttccctctttttcatttatttaattacaattgtaaataatatccttatatttgtcaattataattgtcattacgactataataattgacaaaatacttatttcttatcctgtatcaaattcctataaagaatgtaaaatgtgcattaaacatagtcttaaaaataaaataaaaaaggcagtgcttttgcactgccttcctaaattctgacatagaatggatttcatattaacttgcgttttgtagtaatactcgttttaactgcttacggaaacgaatacccaacgtaaccgctacaatcacaataactccaaaaatgattttaccgatatgatcttctagcactccaaagatatcatgtaagtttccacctaaccagtaaccaccgattaagaagaatgatacccaaaatagagcgcctgaataaattgtaatggcaaaacgacggaatggtaaattaataattcctgcaaagtatcctgtgaaatgacgtacaccaggaataaagaaaccaataaaaattaggaagtacccatacttatcaaaccacattctcgttaagtcaatttttctttgtgttaaaaatacgtatttcccatacttttgaatgaaaggcatacctaatttatttcctaaaaagtattgaatcgtcattcctacacttgtcccaataaaggatagaataattaaaatcggtaaacttaaatcacccttatgtgctaaaaatcccgcatatgctaatgttggctctcccggaaacggaagtgcaatatattctaacagcaagccgacaagtacaacataatacccgtattgctgaaataattcatgaatccattccatgtcatctctcctttcaatcacgtacaacttcttactattattgtataaaaaaattgtcgaaataactatcacaatagcttacatttttattacatttttgtaagggtcacactaatgattttcgttctttattaaatagtaaaaattattttccaagtcgaaatagcgaaaagacgcattaataacatgcagattttatccattttttagcactaaaaaagctttcttattttgttctcaataaaaaaccatcacaaactcatgctaacttcatattagcttcatatacgtattgtaagattatatcggaatttgttgaaaaatttaaccaatatatgactaagcattaatttgaataaatataagtcgtttttcgaaattgaaaaaagggtgaatacgaaatggaagcatataaaatgcacgattttattaatacaaatgttgaatctcatcaaaatgaaaccgtttttaatttacaaatatgtgaaacaagtgaatttgacgtaagtttaacaaaatctacaacactatcttttatcgtttcaaaaaagaatattaaaattgtcacgaaaaaatggattaattcaaatcaagaaagcatgattggcaaaagctacatcattccaacaaaagcttttcactatttcttaccaatcatttctgaaaatgaagatgagctaaatattcaagttcaaagttttggactacgtggtgagcttttattaaatgaaagattacttattgataacaacaaacacaacagcaaaatcactacattctttgaaacattagatgaaaatgtaaataaagcattacgaggattacaacttcattgtatgtaagactattacgatagtaaaaggagaataacaatgaaaaaattattattaagcgcactattatcattaggatttttaactcttccattcgctagtgcagaggcagctacaacgaaagatcaattaatcgtagacactcagttaaataaaatggattattatcaggatggaaaatttataaaaagttttactgtcgctactggaaaagctgcaacacctacacctaaaggcacttttcaaatcgtaaataaaattaaaaaccgcccttattatacaggaaaaattaaaggcggcgatccacgtaatccacttggtgaccgttggctcggattaaatatggcaggaacttacggaacaacttatgcgattcacggaactaacaataatcaagcaatcggcaaatggacaacacttggttgtattcgtatgtataacaatgatatacactggttatttgagcgcgttcagcagcaagctactgtcactgtaaaatagcctaaaaacaagatttatgtgtagccaagaattttatgtcttggcttattttatttattcatttacagtagcaaaacaactgtatttacatatataataggaatagatttgattagctaatatctaaacattgataaacgtagatattaaaattatacagttataatattttataaattttataatacatactataatagaactactgtaattctgaattattcagtaacactaaactattccccttgctaccttcatgattattttatagcgggggcttattatatgtataaacaatctgagtcactcgaaaaatgatgaattcgaatattgcagtaaaaagcgttatttaggaggtgttactatgacgcatatactggtgattgaagacaacccagatatacaagaactgattcgtgaatttctaatggcacaaaactttaccgttgatgtagttggtgccggaacagaaggtattcttcttttccaaaaaaattcatacgatcttgtcctcctcgatgtaatgttaccagatatagatggctatagtatttgtaaaattatgcgaggacaatctgatgtaccaatcattatgttaacaggcttacataatgaagaaagtgaaattaaaggatttgagttaggtattgatgactatattacgaaaccgttccattacactgtatttattaagcgtgtagaggctgtattaagaagggcagcaacgaaggaagcagaagctgcaactatactacaattccatgaattgatgttaaactctacagcatatgcagcttatgttcatggtaatcaaattgaattgacaacaaaagaatttgaaattatttatactttactgcaaaatcgaggaaaagtattatcaagaagtgatttgttgaataaggtatggggctatgaacattatggtgatgtaagagttatagatacacatattaaaaacttaagaaaaaaattaggaattccttatattaaaacggtgaaaggcattggctacaaaatcgaatcgtagcaaagacaacatcaccaaaaatattttcatcaaaaccttattattttgtattcttttatcactttgtctttatcaaattatttactttctagcttcaaactacgataaagaacgttttgcgaaagaaaatggaacgccgactacagaacaggccgattcagataagcaaaacgacggaagtaaaacgaagcaaaataaagctgtgtcaaaggggagtatttctaatttccaatcttctattatagattataaatctctttctacagctatcaatcaccttttgcagcctagccaaactgcaaaggcaaaagaacatacacaaaatctttcggggaaaaatagcacttctaatccgcctacagaagcagaaaagaaagccgctaataatgatgccttacatacacaaaatgcagcaagtaaaacaaatgatacaaatgataatccaaagttagcagatgcgttgcagcaattagctccacatattggcgcgacaatgcttgcattatcactactcggatcattaatttatacaaaactaattgccaaaccttttcaatatatgagtgatgctttaaaagatattatgaatcttgatttctccgataaaaagctacttaacaaaaatgcagatcaaacagattttaatttgcaagtagccgcttcgcaagtaccaaatattgtaaagaatttacatgcaagcaatcaagatttaagaaacgagctcaagaaggaacaacaattagaacaatctcgtaaagaatttatgtctatggtgtcccatgaattaaaaacaccaatcgcagccgtcatgggacaactagatggcatgattcacggaattggagcttataaagatagagataagtatttgaaacgttcctacgagatgatgcaagacattaacatattaacggaaaaaatgtcggaattatccaaaatacaaaaccctcaatttaaaccgaatttagaagtcatttctttatctaatattattgaggatgttatgaagaaagtagattactttgtatctgtaaaacaattaaatgtacaatctaatattaaacacgacgtacaaattttagctgatcctaaatttattcaaactgctatttttaacattatttcaaatgcaattcattatacaattgaccatcagcacgtatatataaagctttatgaaaaaccaaatggttacgcattagaagtattaaatacaggttcacaaattgatgaagataaacttgctcatttatttgagcctttctatcgcgcaaatcctgataaacacgggttagtacaaggtagtggtcttggattatatatcgtgaaacaaatattagataaacatcagtttccttacgggatacaaaacacagctcaaggtgtaaaatgctccattgtattcccaaaagcaatgtaacattcactataattacataccccaaactcatacttcatgtgtgagtggcggaattttgtagagtgtcttactctgtttcgttcgcccgttatccttatttggatagcgggcgttttttattacttaaaaggaggattttttatggaaaagtttaaatattcattgctcgttttattcggtgcttgcagctacggcatactttcaactattttcaaactcggattcataaatggattttcagcacatcaactcctagggggacaatatgtcttcggatggattggactatttctactcgttcttttcttttcacatcataaagtaacaaaaaaacaatttttttcattactaaccgtcggaacaacaatgagtatgactgggattttttacgctatttctgtagaagaactacccgcatctatcgctgtcgtcctactctttcagttcacttggattggtgtcattatcgaagccattgcaaatcgaacatttccaagccacgataagatcatatctatccttattttatttgctggtacattgtttgcaggtggtgtatttgaaggcctcggacaaagtttttctacgaaagggattatctttgggctattagctgctgtctctttttcattctatgtttttgcaagcgggcgcgtcgctacggatgttccgccttatacgaaaagctttcttatgacaacaagtgctactcttatcgtatgcctattctttccgccaacctttttaacagacggtgctttgcaagctggcctatggaaatatactttcttcctcggcttgttcggtgttgtcgtacctgtcatttgtttttcaatcggtgtaccaaaggttggaacagggcttagtacgatattaggtgcagctgaattaccaactgctattattgcttcaattacacttgtacatgaagtcgtaacgttcatgcagtggattggaattatttttatattggttgggatcttcactcctcagctgcttacggctaggaaagaaaggaaacacaatcgcgtgcacagcgcttgaaaaaatacagaatttatataaaagatataactgcaattaaaataagtaaatttatctggaggtataaatgactattttaagcatcgtattttttgctattatgtgtatcttcttcctaataagatatatgaaagaaaagaaattttacgatttacttctcgttcccgtttgtatatatgcaggagcagtgaaaactcctttcgtagagtacttaaactttaatactacatttaaaataacgtatgatattgcagctattattcttgtaatccttgctgtacttttctttttgaaagataagaaagagaatcatactgcataacaaaagacctttcatttacttgaaaggtctttttctctatctcattttaccgctccatacagcttctctatctcatgctcaatttgttttacatcgattcgctcaaataatggctgtacgctatcaattctacttggcaacgtattttgcggttcccaatttcggttcacaatcgacaatgtgtttcgaactctttcacttgaaaatggtaaaaatggttcaaggagatgggcaaaattagcgataagatacacacagttataaatcgtttcttcacatgaaactggatcatcttctctttgtttccaaggctgcttttcatcaaaatatttatttgcaaaacgtactgtatcaaatattgtttctagcgccaccttaaatttagtttgctcaatcgcctctcctacacgcttatataatccttctactttatctttcagctctacctcaatacttcccttcgtcacgataccaccataatatttttcgataaactttaatgtccggttcacaaagttcccgtatgcacctaataattcactattatgactgtaaataaattcccgccatgaaaaatcagtatcgcgattttctggtgcgttgacggttaaaaagtaacgaatagaatctggatcatagcgttctaatatgtcaggcacccatactgcccagtttttacttgtagataattttcttttttcaactgttaaatattcattcgaaacgatatgacgcgggattgcttcctcccctattccaagtaataccgctggccaaatgacggaatgaaacggaatattatcctttccgtgcacataatatgttttcgcttcgctatcccaaaactcttgatcatctttccctgtttcttcagcccaatgtttactcgctgaataatagcctgtcactgcttcaatccatacgtaaattttcttatcttcatacccttctactggaattggtaccccaattggtaaatcacgtgatacggccctatctattaatccttcctttacatatctctctgttagttgaatcgcattgtcgcgccatgtccctgtttgtttggcaatttctacagctcttttaatttgctgctgaaatgtatgcaatgcaaaatagaaatgctctgtttcctctacagatggcgtactaccacataacttacatttcttttctaacaaatcgagaggatctaaaatagcagaacaagcatcgcattgatctcctcttgctgcttcatggcaatgtggacatattccttctacataacgatccggtaaaaactgtgtacacgtttcacaatacgcttgttccactgtttttttataaatatgtccttcttctaataaacgtaaaaaaacattttgaaccgtttcatgatggtgctcactatctgtacgtgtataacaatcataagtaaaaccaaggctacgaaaacatcgctggaactcttcatgatacttatcagcaatttctttcgctgtcacaccttcttgttttgctctaattgcaatcggtgttccattacaatcactccctgaaacatacagcacattctcaccttttgccctgtaataacgcgctaaaatatctccaggtaacaaactcgcaatatggccaaggtgtaacgaaccatttgcatacggccaagcgcctccaataaaaatactcatcttacattcctccttttaaatataaaaagccccgcccttatcttaaaaaagataagggcggggctgtataaacagtcgcggtaccaccttatttcgctaattactcacataattagccttaacaagtacggagcaatatgctcttatactgtggttttgataacgagtaccaactctcgtcgccgcctactattatcatttgataagttcaggacgaagctcaaaggccattgttcaaatgaatattcttgcttcttctcagctaccgaagctctctggaaagaatgtgttcatcctacttttccttttcaacgcttttacgtataaaaagtattgtacgacttaatcacggaaaaatcaaacttttatccagaaagaaaaggaaatcccatccccctgccgaataactatacgttcacaaaaggagtgataacattgaatcaaaaacaactaagcactataaatgaaaaaagctggaatgcagctgcttatgaagcttggacgaatcgccacggggcaccagctgattatgcgaaaaaaatcatgaaagatcccacgcgcgaagtagcacattatttaccttacataaaatccccaaaaggaaaatgtattattaatttactcggctcaaaaggaaataaagctgtcgcactcgcccttttaggctctgacgtaacagttgttgatatttcagcaagtaatgcaaaatatgcaaatgaacttgctgatgccgcaggcgtctctattcattacatcgtttctgatgtactagatgtaaatctctccaaatcatttgatatcgtattactggaacttggtgtacttcattactttctagatttaaaaccacttttcacaacaatctctcaactactaaagcccggtggaatacttatccttcgcgattaccatccaatatacacaaagctattaggagtagaccatccatcatttcgagcaagtggaaattatttcgatgaagaattaattgaagatgatgttgcttatagcatccttcttacagaagcacagaaagaatcgctacctaaaacaaccatccgtcgctggacgttaggagaaatcattacaacactcgcggaagaacattttaaaattgaaaaactagttgaagaacacggacctcatcaaagatggctcttcccttctactgcaccggaaagaatcgaagaacgtatccctggtctatatacaataattgcgacagcatgcaaaaaaggatcccttcacggataggatcctttttgcatgctcacgcatataagttgaggttggagattaccataattctgtagaataggacacaagatatttcaacatttcgtctctgacttacgtcgtcaaaaaggggtatgaccaacataacgaagagtaatgttttagttgatactgataatcgttatcaactaattagaagtatacatgatgtcatttcaaatttcaatagcatttctaatatttatttatgaattttatgatatgcaaatgtatacattttaagaactttttctaatatcaatctgactccttccattatctgctataattttcattgaacagattaataacttcataataatgtttttattaatttcgttttaaatatctataaatcataataaacagtttaaacgagggtaggggtaacgatgaaatatgttagtattcgaaaaaaactactgttcacactcttaagcatttcttctttatttagcattgctcttattgttattctttcattcgccatgaatcaagcaagtgaaatcgaaacgttaaaaaatgatgtatcaaaaagagcgacgattttaaaagaacgtggcgattggttccaagcacaagttgctggtttacaagaatatttactatcacatgatcaaaaaggattagataagttcaaccgagaagggaaaaaattagctgatactagagagaaagtaacaagtgacaagaagctcccagaaggaatgaaagaagctattttaatggggggaaaatggcgtagcgtcatagataatgaggtactacctcttgctcgtgaaggaaaatgggacgaagcatccaaaattgctttagcacaaacagattatgtaaatgatcttttaggtcgttttaataaatatacaaatgaagagaatgagaaacgtgacgcattaattgctgacgtcgagtcttcttcatcacttattcaatatattattttcttctcactcattacatgtacattaacgtctattttattagcatggtggttctctggtaaactcgttaaaccaattcgacaaattgatgagaagttaaaagaattagcttctcaagatggagatttaacggctagattacacgtaacaagtaaagatgaaataggtgacattgcaaattcctttaatcaaatgctcactaacttacagcttataataaaacaagttcaacaaacatcaacaagtgtaaaagaagcttccgaaaatgtatttatcgaaacgactgcttctatggaaaataccgcaaggacccaagaaactatgaatgctcttgaacacaatattcgttcacaagtttctagcattgaagaaagttcaactgcaatggatgacatggcaacgagtgttcagcgtatcgctgagtccgcctcttctgttactagtttagctgttacaacttcagaaaaagcagatgatgggaataaagtcattgagaaatctattacacaaatgcacacaattaacgaagctgttaacgctacatcacaagtagttgagcgactcattacacatacaaatcatatcgatactgcacttcaatctatttcgaatatcgccgagcaaacaaatttactcgctttaaatgcttctattgaagcagctcgtgctggtgaacatggcaaaggattcgctgttgttgctgatgaagttcgaaaacttgctgaacaatctcaactagccgcaactgacattaaccatttactgcatcaaattcaagccgatactaaaatagcaaatgacatgatgacacaaggtcaagcagaagcttctgaaggaattactgttattcgtactgccggatcttcattctcagaaattgttaaccacattaacaaagtctctacgcaaatgcaagaaatgtctgcaactgctgaagagatggctgcaagctctgaagaaatgaacgcagctttaaataatatcgcctctatttcaaatgaagttgctgcagaaacattacaaacagcacattcagctggtgatcaagtaaacaaaatgagtatcgtggctaacaaatcatctgaaatgaaaacaatcgtacaagaacttgaagttctcgtctctcatttcaaaacaaacgcttaaagtgaacctttcgcttgtaatgacacaagcccaaaggtataggaaagaatattttacagtctctcttttttcaatttaaaatatctctttctatctctcattccgtctgctataattcctaaaggaaataagaaagctttattccaactggagtaaagctttctttcaattttttacatttattaattctaatactaagatttcacaaaggaggcttttaatcatatgaattttgtaagtatcagaaaaaaacttatgttcatgatgggaacgatttgcgctttatttggcatcgccttagcttttattttattttttgctattgaccaatctcgtaaagctgaaacattacaaaaagaaatttctccactggcaacagaattgaaagaacgtggagacgcttatcaagtacagctatctgctttaaggggttatttactacaacatgatcaagtcgaattagacaagtttaatgagatgagtaaacgtcttgaggattcaaaagataaacttctttctaatccaaatctttcttcgtccgtaaaaagtacaatggaattagggtctacttggagaaagttcgttgaagaaaaagtattcactcttgcaaaagaacaaaaatgggaagaagctttacaagtagcttcttcagaaaacggaacggtctataaagtaattggtgacttcacaaagtacagtaatgaacaagctaaattacgtgaacaatctattgaacaaattgatcaatcttcactaggaattgaatatgcagtctttctatcacttgttatttgtattgtcgttgcaattattcttgcatggtggttctctggtaaactggtgaaaccaattcaacaaattgacacgaaactaaaagaattggcctctcaagaaggtgacttaacggcacgtctacaagtaaatagcaacgatgaaataggtgctatcgcaacatcatttaataaaatgttagaaaacctacaacatatcattaatcgtgttcaaaaaacatcagtggaagtgcaaaccgcttctgaaaatatgctagaaaaaacaaatacatcacgtgaggcgacattaagagtccaaagctcgatgtccaacttaaatgcaagtattcaatcacaaacttctagtatggaagaaagttcaactgcaatggatgatatggcagtaagtgttcagcgcatcgctgaatctgcttcatctgtagcggaacttgctgttgccacatctgaacatgctagcgatggaagtacggttatccaaaaatctgtttcacaaatgacaacaatacacgaagctgtaaatgctacgtcagaagtggttgaacgtctaatcactcatacgaaatatattgatactgctgtacaatctatttctaatattgctgagcaaacaaacttacttgctttaaatgcttctattgaggctgctcgtgctggcgagcaaggaaaaggatttgctgtcgtagctgacgaagttcgaaaacttgctgaacaatctaaaacagctgcaacagacattaatcaattactacatcaaattcaaaatgatacagaaactgctagctctatgatgtctcaaggccgttctgaagcatttgaaggtatcaatgttattcgtgaagctggtacttctttcacaacaattgtggaacaagtaaataaagtatctactcaaatgcaagatatatcagcaactgctgaagaaatggctgcaagtgctgaagaaatgaatgcttcacttaataacatcgcttctatctctactgaagtatccagcgaaactgccgcaacggcacaatctgctgaacagaaagttatcgttatgaatgaaatgacagtaactgctagaaaaatgaaacaaacagttgaagagttagatcagctcgtatctcattttaaaacagaatagatgttcaaaaaatatccctcttgcgaagagggatattttttcgagctcatttcctgcacattatgctcatttccgttataatgagaatcgatatcattaaagtgtaggaggggctgcttatgtcacaagaagcatttgaaaataaattacttgccaatttagaagctgttattgaccctgaactaggtgttgatatcgttaatcttggattagtttatgatgttacagcagatgaaaataataatgctgtcattacgatgactatgacttctatcggttgtccaatggctgggcaaatcgtatcagacgttaaaaaagtattatcaacaaacgtacctgaagttaatgaaatagaagtaaatgtcgtttggaatccaccgtggtcgaaagaacgtatgtcacgtatggcgaaaatcgcattaggtattcgcgactaaataaagtggaaatttcatcatttgcggatagcgggataaagaaaagacctgactaggatgtcaggtcttttctcttattattttacacctactgcatcataagctttcgttacagcttgtacagctttagagtttttaccgtataaatcttcagctgactgaagtgccgcttgacgcatcattttgaagtcagagtttgcagttaaatatttcgtaagagcacggtagtaaattttttctgtcgcttcacggcccactccagttactttcacaccgtaatgatccccgccttcagatactaagtatgcagctttattgttaatactgctgttaatatgaacgccgccattatcagctgttccagtgtaacgtttactatagtgatctgggtaaccttcacttggttttaatgggtttggaatagacgctgggtctttaagagagcgaagcgcatcaccaggtttatcaggtgtataaatatcagcacctaaatcccagctcttcttctcaaccataacacccataatatcagataacgattcatttaacgcccctgactcatttttgtaaacaaggtttgctgtatgttcagttacagcatgcgttaattcgtgaccgataacatcaagtccagcagataatggaatgaaagtttttccatctccatcaccatacatcatttgcacaccattccaagctgcgttattccaagctgtacctacgtgaacagttgaaataagcttcgcacctttatcatcgaaagagttacgattaaatgtctttttgtagtaatcatatactttccctgcatttacatgcgcatcaactgcagctttatcttcgaagaacttagatttactttcaacttcttctcctgtatatccaagccattgtgagaataaattaaaccagttctcgtccatattttctgcatcaaatgtatgaatgccttgtcctcgtttaccatcaaacaagttgaattgtcctgttttcgtatcttgagcaatttcaaatgattgtctagcacctaatactccgtaaccaaatccagtaatgttatctacagcgttatatttctcaataacatttccattcgttgcatcaacaaaataatgccaatatcctggagctggttttgaaatcgatgccttaactaagtatgcaaggtagtaattaccgtccttttcatatacaaacaaatcttttttcacaccgtcataactctttactttaccaatttctttctcaatatctgcctttgcaatcgtttctgcttgttccgcagtaatgcttgcagctgcaggaatatttttatcatctaaattcggaataacttgtccgaagaatgcttttacattattctctttatcaagtgtaacagtttgatcagaaccgtacacaggaatgttattatgtttctcaactagcttcacatgtgtcgtatcagattcagcgtctttttcttctccaacgatattaaaatgcttttcaatatttcctgctaatttaaacatatctttcttactctctaagtattgaaagaccgtctcttttttatctagtccttccggtgctttccattcttcacctatgtatgcaggtgttttaaattcttgatgatattgaattttttgttcttccgctttcgttgtcgttgccccaaacgctccaaatcccccgacgataacagttaacgctaatgctgatgaaataacttgctttttcactataacattccccattcccataaagatttttgacacttttatacaattcttattttcccagccgatacctctaccgaaaatttgagaaacatttttcagataattccaatccaaaaaagaggacatctatcggatgtcctcttttctataaaccttttattgttttttcaattcaattgctaaatagtgtgattgctctttcgcttgaatgtgaatatcttcttctacagattctgccgcatcccgcataacaaacgtttcaccattgattacactgcttccttcaatttgtacaagatacaattgacggccttctttcactggaaaatgaatttcttttccagcctctaatgataaggaatataaattcgcatcttggtgaatttgaattggtgcatttccttctactgaagataccatatggaaccattcattttcacgcttgctccaatcaaatttaaactcaccatagtttggtttatgatctgcacggtctggtaaaatccaaatttgtaataaacgcagcgtttcatcgcctaaattatgctcgctatgaaatacacccgtgccagcactcatatattgaacatgtccacgctcaatcgttccgcgatttcccatgctgtcttcatgtgttaaagcaccatctacaacgtaagaaataatctccatatcacgatgtggatgcatatcaaaaccagtttgcgccgctactagatcatcattaataacacgtaacgctccgaagttcatgttatttggattgtagtaattggcaaaagaaaaatgaaaatgtgtatttaaccaaccatgatttgctctgcccatatttttatgatcaacttttctaaacatatccttcacctcatactatctcgaattcgagatttattttaaaattttttcttactgtaacttttttaatagtgttaataactgcttttgttcctctatatttaaattatgaaacttctctgcttggaacgtttcttgaggtgggacgatttcctcatataaagctcttcccttttctgttaaagaaatatatttcgtagtaccctcttgttcacgcaaaatccactcaagctgctccattttatttaaaagctgcgttacatttcctttcgtaacaaatagcttatttccaagttcttgctgcgttaaacgattatatcctccaacttgagctaacacatcaaactgggcggcagatatattccattttttcaaatgctgattcgtctcacgaatactcttattataaaagcgtgacaaacgaaaccataatagtagccctagtctatcttctgttttcatttcatcacctcgctcgtttcatatcattagtttagaactaaacttaataaaagtcaaatacttatttttaataagcataaaaagcacagcgctatttctccactatgctttacattaactttctactcttatattcatccaatttcctctccgcgaacttcctcgcatctttttcaatccaccgctcttcgtaccgttcacttcccacatacaatatatctctcttatgctgcatcgcatggcggaattcatgcagtagcgttttgagaacttgatcatactcttcccacatacaaacgaaaattaattgcttttctttatgataaaaaccacctactgggaataggaactcttcttcctcttcccctaatgatagaagcacatcatttgcatcacacgtatcacaaaaaataacgggcgttttacatacttcaataagagaaaacaaatcctctctcaactttttgacatcccaaggaagctccgaatccaacacataccaattctctacctgttgatatacattttgaaactggagttccatttctctttattcccctttccaagcaccctttttctatatgtatgccacaatatagtaaatattaaacgtattctttcatccttgaaaaaatgccaataaaaaaggaatctacgtcgacatagattccttttctgtaatcacttttttttcatcattttttttaatacaaaataaccaattgcactaacaatagcaacaagtgcaaagtatttcacatatggccccgcaactttattaatactttcccactctgttcctaatttaaaacctaaatatacaaacacaattgaccacggaataacagctaatgtagttagcgtaataaacttagcatgtgacattttcgcaatacccgctggtatcgaaatagcatgacgcacaaccggaataaaacgtgcggtaaagataacgccagttccataacgattaaaccaatcttcagcataatcaatatgtttcttctgaattaaaatatattttccatatcgctcaagaacaggtcttcctccatatcgaccaatccaataaatgaatagttgtgcaattacaccaccaattgtaccgaacgcgacagcgccccaaaatgtaatgcttcctgttgatactaaatagcctgcataagacaatacgatttcacttggaataacctctagcattaatccaagcataattccccaataaccaagtccttctaaaaaaactaaaaccgaatgaatcaactctcctaacatcatgtacctctctttactgttttcatcaccaaaataaaagtacaagcaggaaatatcttgtacttttatttttttaatttagttagtcttcgtatcccacttaaagattttatttaagaatttatatacattcttcgactcttttgtcagaagtgggcctaaaatggatagtataagcacgtatagtgctgagaatggtttcagtactgacattaaaccaccggcgataccgatattagccataatgatggagaactctcctctggaaacgattgttaatccgatatttgttgatgctttatgagataatccagcttgtcttcctgcaatcattcctgctacaaagttaccgattatcgtaagaaggacagcacctaacgttaaccatatcgctccgcctaatgagaacggatcaatacttaacccgaagctgaagaagaaaatagctccgaaaaagtctctaaatggaacaacaagatgttcaattcggtcactatgctctgtctcagagaaaactaatcctagaagaagtgctccaattgcttctgcaacgtgaattgtttctgaaaaaccagcaatgaagaataacgaagcaaatactacaataataaagatttcatctgagctaatattgagcaatttatttaataacggcgtagcctttctagctactataaagaatagaagcatatatcctaaagcaattccaattgaagtaagggcacctaagaaggaagcgtgatctccaagtactaaaccagaaacaactgataaatatacagcaaggaatatatcttcaaacataataattcctaaaattaattcggtttcattattaccagttcttcttaagtccactaacactttagcaacgatagcgctagaagaaatcgtaataatacccgcaataattaagatttctagtaatgggaatcccattataaatccgtataacaaaccaagtgaaaagttaattaaaatataaatcgttccgccaatcgcaatagagcgtccagatttaattagttttttcattgaaaattctaatcctagatagaatagaaggaatagaaccccaattcgtccaaggaaggaaattacacttgcactttcaataaatttgagatcgataacacctattgtcggtgcatgcggtcctactaacattccaagaacgattagaaaaggaattactgagaatttaaatttcccagcaattactgctgcaattgccactaaaactaaagctgtaccaacttcaaaaattaacgtatccatctaatcagtcccccctatttgaaagtaattcattaatgatttttttaatttcttctctctcacctgaaactacaagcatatctccttcttcaattactgtttctggtcctggattaaatagcttcttcatgttcttcttcataaccgcgattattgttacgctatatgtttttcttatttcaagatcgccaattgtttttccgattgctggagctgtattctccactttgaaccactcaatcgctaaaccttcaaaaaccatctcaacattttctaacgccctaggcttatataccattccacctaatattgcagcgatttgtcttgcctctgagtcacgtagtgaaatacttgagatgctttcttcatggtctgaatcaaaatgatacatttctctacgaccatcatcatgaatgacaattaccatcttttcattacctttcgtaacgatttgaaacttataaccaatacccggaagttcactttctctaatattcatttttagctcctccataacttgtttattttaattttctgtttttctgtcttttattcatccaatcaactttagaaattctaaccactcaggatatttgtgatttggaaatcttttattgtaataataagtggaccctaaaaagatacttaaagatgtaatgataaaaaatatattacttctcattttcaaactctcaaggcttactttccataaagaatcttctttcaaattatccccactttctcgctttaaatttagttttttaaaatgtaaataattctaaaaatattacgatgtaacataatcataacacaaaaatgttttaagtaacataattttttagaaaaattgattctcgtatattttttgcatataattttcttattacgaaaaaaaggaagtgtattatatggttgatatctttagcagattccttgaggtaacgaataatattttatggtcatatattcttattgcaatgctaatcggcttcggtctttacttctcttttaaattaaaatttgtccaaattactcatttcagtgagatggtcagcttaattagtaaagggtttaatcgaaaagaaaaaaagaaagatagcatctcaccattccaagcattttgcttaagtgcagcagcacgtatcggtatcggaaacttagctggtgtagcattagcaatttcaatgggtggacctggcgcaatattttggatgtggtttatcgcaattatcggagcagctactagttttgtagaatgtacacttgcgcaaatttataaagtaaaagatggaagtaggttccgtggtggaccagcatattacatggaaaaagggttaaacaaacgctggatgggcgtctggttttcacttcttattacagttgcgtatggattaattttcaattcagtgcaagcaaatacagtaacaatagcgtttgaaaatgcttttggactagagcgaacaatcgtaggagctctattagccttattagttgcagttattatttttggtggcattaagagcatttcacgtattacagaaatgattgttccgccaatggcaatcgtttatatcggcgtggctatttttgtcgttattaacaacttcagtatgttaccaagcattttcatggaaatctttaacggtgcattcggtttagaccaagccatcgctggtggtattggagcagcaatcaagttcggaattcagcgcggtttattcgctacagaagcgggaatgggtagttctcctaatgcagccgcaacatctgatgtatctcaccctgtaaaacaagggcttgttcaagcgttaggcgttttcgtagatacattcttagtatgtacatcaacagcatttatcgtattatgttctggactttacaaaggatcaaatttagaaggtatcgaattaacacaaaacgcattaagttcacaaattggaccgtgggcaagcactttcttagcgattattattttcctattcgctttcagttcacttctaggaaactactattatggtgaaacaaatatcgcattcattaaagaaagtaaaacatggttaatgatttatcgtgttgcagttgtcggaatggtattcttcggatcaatcgctgctcttaaaacagtttggagtttagctgatttattcatgggactaatggtattcacaaacttaattgccatctcattccttagcaaatttgcttacgctgcattagtagactatttgaagcaaaagaaacaaggaaaagatcctgtcttcgttgcaaactctatccctggcttaaagaatacagagtgctgggatgggcaagatgtagaagaaaaacaaaaggctgtttaacaaataaaagcggaagcggctcgttcagaatcgcaggacacttcaagctctcgaccttgaagcgctttttgcttcgagcgagagagcgaaatgaccggagattctagccgctggagctggatatcaattaaaagcggaggtgacttgctcagaacaggagggcattggagctcctgacgaagaggcgttctttgcctcacaggaaggcgcgaaatgaccgactggtctagtcaccggagctggatatcaattaaaagcggaggtgacttgctcagaacaggagggcattggagctcctgacgaagaggcgttctttgcctcacaggaaggcgcgaaatgaccgactggtctagtcaccggagctggatatcaattaaaagcggaggtgacttgctcagaacaggagggcattggagctcctgacgaagaggcgttctttgcctcacaggaaggcgcgaaatgaccggagattctagtcaccggagctggatatcattaaaagcacaagcggctcgttcagaacaagagccatatctcaaacaaaggccctattacttcaccgtaatagggccttttatttacaacagttcataatttgttcaaattaattccagcaaaagggttgatttatagagattactagattataattattataaattagtaattgatatcacataacaactcaaaaggagattgatcataatgaacaaacaagtaatcgaagtattaaacaaacaagtagcagactggagcgttttattcacaaaacttcacaacttccattggtacgtaaaaggacctcaattcttcacattacacgagaaattcgaagaactttacacagaatcagctactcacatcgatgaaattgcagaacgtattttagcaattggcggcaaaccagtagcaacaatgaaagaatacttagaactatcttctattcaagaagcagcatacggagaaactgcagaagggatggtcgaagcaatcatgaaagactacgaaatgatgctagtcgaactgaaaaaaggcatggaaatcgctcaagactctgacgatgaaatgacatctgacctactactaggcatctacacagaactagaaaaacacgcttggatgctacgtgcgttcttgaatcaataatagatttaaaagcggaagcggcttgctcaaaatcgcagggcattggagctctcgaccttgaagcgctttttgcttcgagcgagagagtgaaatgaccggagattctagccgctggagctggatatcacctaaaagcggaggtagcttgctcagaatgtgagggagatggagcttttgacgtagaggcgctctttgcctcgcaggaaaaagcgaagccaccgaacattctagctaccggagctgaatattactttaaagcggaagcggctcgttcagagtcgcttttttctatagattgatcgcgcatgctggtacatgaaatttatatcagcgatttttccaacatatcggcgattctccccaatatatcagcgattatccaattatatcggcgattccatccaatatatcagcgatttttcaattatatcgacttatcgacaaatcacgacaatattaacacgcctctctcccctacttttatcaatatattacaatctcatctatgttaaaatataggaaacaccctttagcttttccaaattcatcatttactacttaaatgacgggagtggttcagttgaaagactacttaattagagcattttttgcgttaataacagttgggattctcttacttatagctaatattttcaatatacgtgtcgaggttaaggactatgctttcctcgttgtcgtagcaattggtggcggctggggtggctggtacctgtataaaaagcaaagcaatcaaaataataaaggcattccaaagtaatacggaatgcctctttttattgccttctgtaataaataatgaaattcagaccactaatacaaccaatcgcaataaacatacaaaacgattgtggatctccacctagattatactcatcaacgataaacccagacataaacaacgttatcgcggaaacaccgatacacaataccgagataaaccaaagcgaaaattcattaatcaactctttcttctgtctcaaaacaattagcataacaagaatagatgctgctaaaatacttttaaagaccggtcttaaatacacaaactcctccatctctttctccttttccaaaaacattacatctaaaaattaacatatttaaccaaattaaaaacacatgccatcttaaattaaaacgacatgtgtttccgtatttgctatgatagttgcttccacttcgttcccaaaacaggacgctcataattttggattgcatgaatcagtttatctgctgtctctgctgaaacgatcaattctttatttgatggattcataaatccttcttctgctgcacgttcaaccatttgcaaaattggtccgtaaaaaccttttatgtttaataaaccaaccggcttattatgtataccaatttgtgaccaacatacaacttcaaatagttcttcaaacgttccgtatccgcctggaagcgcaataaaagcatctgcaagctctgccattttagctttacgttcgtgcatcgtctctacttcaattaattctgttaatcctgtatgcacaatttctcctcggaatagaccgcgcggcataacacctgttacacgtccacctaaacgaagaacttcgtttgctacttctcccattaatccgacacatgaaccaccgtatacgagctcatagtcgttctcaacaaacattttacctaactgaattgcctgctctttaaattctggtctctctcctaaattagaacctgcaaacacacaaatctttctcatccctacaccccgaaactatatattgttatgatacaatgaacattgtacaacatattgaggagatgaggaagaaatggatatcgttgcatttcaaagatgggttgaggaattttacgaaaaacgaagctggtcacagtataatgcctttattcgcttaaatttcttaaccgaggaagttggggaagtttcacgagtcgttcgtgctattgaaattggccgcgatcgccctgatgaagatgcgaaaacagaagaagagctaaaacaagaactaaaagaagaacttggcgatgtactatctaaccttattattctttcgcaaaaatatgatttagacttacaagacattatggatgcacacgtcacaaagctttcgaaaaggttcgaagtatctaaatgagaatattatcaattatggtataatattattgtcacaatactaagggggattttatgttatcaaaaaaattgcacgacgcattaaatgaacaaatgaactttgaattttactctgcccatgcttatatggcaatggctgcttactgtacagctgagagctatgatggattcgctaactttttccttgtacaagctgaagaagaacgtttccacgcaatgaagctttacaactatattaatgaccgcggagaacgcgctattattactggatttgataatccgaataacgaatacaaatctgtattaaacgcttttgaagtcgcacttgagcacgagcgtgaagtaacgaaacgtatttacaacttatctgatatcgcttgggacgagcgtgaacatgcaacaattacattcttaaaatggttcgttgacgaacaagttgaagaagaagcttcattcgatagcatcattcaaaaattaaaacgtattacaagcgattcaaacgcactgtttatgctagatgctgaattagagaaacgtacatttacgcctccagctgaataatatttcaatcaccttaatacatgaattaaggtgatttttttgtttgctctctatcttaaaatcaccttaaatttcctcatatttgacatagtgccagctataaaatggtattattttcaatataaaaacgaatatacgaggagaggaaaaatgaatcaacgtgtagaagctgttgatgcaattcgtggtttcgctttgtttggcattttactagtcaatatgacattaattcaattcgggttcttcaccagtgaaaaaccaacttatctattcggcgatcttgataaaggcgctaattggtttattcaattcttcggcacacataactttatatccctattttcttttctatttggacttagcattattttgttacaaaaaagtattatcgcaaaaggaaaaaaattcttccccacatacataagacgtattatcattcttttactactcggctacattcacggcacttttgtttgggagggagatattttatttgcatacggaataattgggattttcttaatgatgttcatcaatcgaaaaccgaaaactttgctcatttgggcgattattctactcgcacttattacacttatgtcttatcaaactgatccatctacaaatataaatgattttgcaccttatactgaaaaagaacataaagtccatcaaactggaagctatatggatcacgtcaactttagattgactgaaaatccttttgattacatgggaattgacggtgcattcggattatttttcatatcagttttcgcaataatttttatgtctccactgttcctactcggaatgtatgtagggaaaaaaggctggctatttgaggtcaataaacatatacctggtgtcaaaaaaatatggtttgccaccggtctcttctcttttacaattaaaatcttagctatgttcgtaaagcacccgcttttaattatgttacaagatggccttacaccagtaactatgaccttcttttacggaagcacaatcattttattattccattacaaaaaagcaacccgtctactaacatacatggcgaacatggggaaaatgtccgttagtaattacttagcgcaatctattatcgcaacaactattttttacgcatatggatttggcttatacgggaaaatcggctatttcttcggtattcttttaaccatcggaatttatacgattcaattattcgttagcacctattggctccagaaataccgaatggggccagtggaatatgtgtggagactgggaacttatttagagaaaccacgttttaaaagaaacttggataaagcaagttaaacaaaaaaagcaatgagcctacgctcattgcttttcttaatttattaaagcataaccccaacgataatcgctgataatatacttactaacgttgcaccgtatacaagttttaaaccgaatgatgatacaacgtttgcttgtttgccatcgatactcttcgttgcacctgcgataattccaatagatgagaagttcgcaaatgatacaaggaagatagataaaatacctactgtacgagctgataaatcaccagctactttaccaaggtcaagcattgcaacgaattcgttcgttactaattttgttgccataatttgtcctgcttgtagcatctctgatgttggaatacccattacgaatgctaatggtgagaagatatatcctaaaatgctttggaatgtgattccgaaaattgaatcgaatacaccgttaattgctgtaattaatgctacgaaaccgattaacatcgccgctactgttacagcgattgagaaaccaagcataatatattcgcctaacatttcaaagaatgtttgtttcttgtcttcttgtaattctaaaatatcgtcttcttcttttacttcatatggattaatgatatgaacgataatgaatccactgaataagtttaatactagtgctgttactacatattttggatcaatcattttcatataagaaccgacgattgacatcgatactgtagacattgaagatgcacaaagtgtgtataaacgatttttcggtaatttgcttagttgatcttttactgtaatgaatacttccccttgaccaacgattgcagctgctaccgcattatatgattctagttttcctaaaccgttaactttacttaataggaaaccgactgcacgaatgataatcggtaaaactttaatatgttgcagaatcccgattaatactgctaagaaaataatcggtaataatactgttaagaagaatggtgcttgtccatcgtttgctagaccaccaaatacgaaattaaccccagcttccgcaaattttaaaatagcgccaaatccatctgcgatcccttttactaatacgaatccgacctttgtatttagtaagaaatacgcaagtaccaattgaatgacaagcataagtgcaattggtttatatttaattttcttacgatctgaactgataaggaaacctagtacaaacactacaagtaaaccgactagaaacattacgaacttcatatgtgaatcctccacttctcccacgagttattggtcgtataacgtataacgaatgacgtctgaccattgttgttaaaaaatttaaaacccctaaaactattcaactgtcatctaaaatcagtaagcgtttacataaattgcaatttataaaaggtagcttcttctctcctaccataattgaaagtctgaaattgataccacctacaaatcaaattgtaagcgttatctagacgaaatgcaatataaattttaaaagatttttatatgttaatatattcctaattaattggttttttcatgcaaatttaccataaaaatagccctagctatgagctaggaccatctttttttataacataacaccaacgataatcgctgatagaatacttactaatgtcgcaccgtacacaaggcgtagaccaaatgatgatacaacatttgattgattttcatcgatacctttcgttgcacctgcgataattccgatagatgagaagttcgcaaatgatacaaggaatacagaaaggataccaactgtacgagccgataaatcaccagctacttttccaagatcaagcatcgcaacaaactcgtttgatactaattttgttgccataatttgtcccgctgttaccatctcagcttgatgtgtagcatcctcctgcgattagcaagagggtagctactgcccatttcggggaataacgttttttgacacttgggggtagtgcaaattcttaagttgatgggcatggggtaggaacagattataacattttattatatacgaggtttaaagaagaattaagtaaacaagaaaatgcatttttagctacgaaagaaacattcaaatcagcaggtaaaactgtattatatagcggaatagcggtgctaattggttttgcatcacttgctttagcaagttttaaattatatcaatcgacttcagcggtagcaattggtgttttagtattattactcgtattaacgactttaaatccatttttcatggtgcttttaggaaaaggaatgttttatccagttaaaacatttaaaggtcatgaggatagtcgcttgtggggattctttgcgaaaaactcagtagcaaggccatttgtcgctttaatcatcgtattcgtaatatcgattcctttcgtattaaaatactctaatacacttaattacaatgatttatttgaagtggataataagtatgaatccaagatgggtattaacgtaatagaggatcattttccgcctggtttctcttcaccgagtacattagtcattcaatctgataaaaagctggatgaaggaacttctctacaaattttagacgaattaactgataaaatttcgaaagttaaaggtgtgtcagaagtatatgcaccaacacgtccaactggtgagaagataaaagaattatatttaaataagcaagcgggagaattgaatacaggattaggagatgccgatggtggcataaaggaaattaatgatggattaacagatgcgaaaaataaaatgggaagtaatgattcaaatagtcttgcgaatgttcaaaaattaattgatggaacgaacgaggtgaaaaacggggtatcagcattaggaacagctttacatcaattatcaaatggcataaacgacggtgcacaaggagcacagcaaattgagagtggtttagcttcagtaaacgaaaatataaatgttctatctaatgcaacgtcgcagctgcatgctggttatgcacagttagaaaaaggtttaaactcttacgatcaatacttcggaagtatttctcaagcgattgatggtgcgaaaaagggatatgaacaaattgaaatgttaatgaccaatttcgttcaaacgaaaccagaattagcgaatgatccaaacatacaacaaacgataggaattgctaaagaggctcaaaagaaattaagcgtactttcaaatgaattaaatcaattagcaacacagcacaaaacggcgatgagttcatttaaagaagcgaatcaatcgttactgaaagtggataacggcttaaaagaaatgagcaatggagttaataagttacaaaagggagcagccgatcttaaaaatggattaaatgaaggttcttcaggttcaaaacaaattgcaaataaatcagttgagttacaatctggattaacgaaaataaacgatgggcaaggacaacttttaacgggccttaaagacctgcaagaaaagatggggcaattacaatccggtttatctaaaagtacagaagggcttggaaaagtaagtaatggcctgcatgacgcacaaaaatatttaggggagctcaatgaatcgaagagctctgagaagttttatattccaaaagaagtgctagagggagaagatttccaaaaagcattgaacacgtacatgtcgcaggatagaaaaattgctaaaatgactatcattttagatgtaaatccgtattcaaaagaagcgatgccaattattcaagaaatcaataaaacaatcgatggcactgtaaagggaacggaattacatgatgcgaaaacagcaattggcggaacaacagctagaaacgttgatttaaaagaagtaacagggcaagatttcttacgtacagctacaattatgttaattggaattgcgattgtattaatcgtaattacacgctcattactaaacataatatttattattggctcattactattagcgtacttcgcatcactcggtataagcgaacaaattagtgcacatgtattacatgtagattcattaagctggaatgttccattctttagcttcattatgattgtcgctttaggagtggattatagtattttcgtaatgatgcgctataacgagatagaaggggattcggtaacgaaaattgtaactgcatctcgtcatataggaggagttgtattatcagctgcgctaattttaggcgggacatttgcagcattaattccatcaggtgtattaacacttatacaagttgcatcagtagttggcgttgcacttcttctattagctttaattgtgatgccgatattattaccggcgttaatagggttaacgagtaaaatgaagagttacaaagagaaaataataaatacgaaataagaagagactgtagggaatgatttctctacagttttttcggtatataatatttcagatgaaaatgaatccgatatattacagaatgagcagtgaaaggttatatgagaaagaggtcgatgatatacatacaatagctaggggaatggacaaaaactatccgatttcattgtagaaaggtaatcaaccgttgctattcatccatcttctactatataatagctatagtctacaataattgagtcgtaatatgcgatttcttaagacaatcggtgagaaaacgctgaaataagcggtattagtaggaggacacaaatgattacagtaagtaacgttagtttgcgtttcgcggatcgcaaattatttgaagatgttaacataaaatttacgccaggtaactgctacggtttaatcggagcgaacggtgctggtaaatcgacatttctaaagattttatctggagaaattgaaccatcaacaggtgacatacatattacgccaggtgagcgtctagcagtattaaaacagaaccacttcgaatatgaagagttcccagtattagaaacagtaattatgggtcacacgcaactttacaaagtaatgcaagagaaaaatgctatttacatgaaagaagactttagtgatgaagatggaatgcgcgctgctgaacttgaaggtgagttcgctgagcttaacggttgggaagctgagtcagaagctgcaattcttcttaaaggtttaggtattggtgaagaccttcatgataagaaattgtcagaattaactggggcagagaaagtaaaagtattacttgctcaagctttattcggtcaacctgacattctattattagatgagcctaccaaccacttggacttaaaagcgattcaatggttagaaaacttcttaatgaactttgaaaacacagttatcgtagtatcccatgaccgtcacttcttaaataaagtatgtacgcacatggctgaccttgatttcggtaaaattcaactttatgttggtaactatgacttctggtatgagtcaagccaattagctttaaaattaacacaagatgctaataagaaaaaagaagagaaagtaaaagagttacaaaacttcattgcacgctttagttcaaacgcttctaaagcgaaacaagcaacttctcgtaaaaaattattagacaaaattacattagatgatattagaccgtcatcacgtcgttacccattcgttggcttcacacctgagcgtgaagtaggaaatgacttattaactgttgaaggtctttctaaaacaattgatggtgaaaaagtgttagataatgtgtacttcactttaaataaaggtgataaagttgcatttatcggccgtaacgatattgcgatgacaacattatttaaaattcttatgggtgaaatggagccggatagcggttcattcaaatggggtgttacaacctctcaatcttacttcccaagagataactctaagtactttgagaacagtgattacaacttagttgaatggttacgtcaattctctccacaagatgagtctgaaagcttcttacgtggtttcttaggccgtatgttattctcaggtgaagaagttaagaagaacgtttctgtattatctggaggcgaaaaagttcgttgtatgttatctaaaatgatgttaagtggtgcgaacgtaatcacacttgacgatccaacgaaccacttagaccttgagtcaatcacagcattaaacaacggtttaattgcattcaaaggtacaatattattcacatctcatgaccatcagttcgtgcaaacaattgcaaaccgcattatcgaagtaacaccaaacggtgtaatcgataaagaggctacttatgatgagttcttagaaaatgaggaacttcaaaaacaagtagatgcaatgtacaaaggtcaataatatataatgaaaaaactcgttctttttagagcgagtttttttgtcgagaaaacgtaacatcgctggtcggtcaaatgaataattattcaaatataatattaatgaacaggagaattctttcatgtatggaagggatgtaatgactttaagatttaaagagttagttgaagaagggaaatgtaagtggagtaatataatcaaatcgtattattttgtcatgtgaaatatgtaccaaatttggagatagaatagtttgcgaatgagtttataaaggtatatagtatggggtgtcataattagtggatgaatcttgggagaaaacaggaaatgttacaaatttattttgttaaatagaaaccaaggtcaaaatgtctagaaagaaatagttgaataaatactagcttcaaattataattactaatattcttcatatagttaaataaagataatctatttgaagaagaaaatttgaatagagagacagacttataaaaaataagccttggatgatcaaaagaggtggagaaatgaaacagttcttattaaagagcaaaagtgtgttaagcaatcattttggattctttctgtttgccgttattttattgtggctcaaaacatatgcagcttatgtaacggaattcaatttaggaatttcaaacacaatccaaaaattcttgctgttttttaacccgcttagttcagcagttctatttttaggacttgcattatttgcaaaagggaaacgatcttatatttggttaattatcattaatttgttattgtcgattcttttatacgcaaacgtagtatactatcgctttttcagtgactttattacgttcccgacattaacacaaacgaataactttggagatttaggtggtagtattcttgcgttgctacatctttatgatccattatacttcttagacacgattatattaattgtgttagtcgcaacaaaatttgcaaatccaaaaccaattcgtgttgcgaagcataaattatctctagtatttgtagtaggtattttattattcagtgttaacttaggtcttgcagagtctgaccgtcctgaattattaacaagaacgtttgaccgtaattatattgtgaaatatttaggtgcatacaactacacaatttatgatggaattcaaagtgcgaaagcatcaacagaacgagcattagcggatggcgataatatgacagaagtacgaaattatttaacatcaacttatgcaagtccaaatcctgagtatttcggtaaaggaaagggaatgaacgtaatttacattcatttagagtcattccaaaacttcttaattgattacaaattaaatggtcaagaagttacaccgttcttaaactcatttacaaaagatgcgaatacactatactttgataacttcttccatcaaacaggacaagggaaaacatctgatgcggagtttatgttagagaattcaatgtttggcttaccgcaaggttctgtctttacaacgaaatctcataatacgtatcaatcagcaccagctattttaggacaacaaggatacacatcagcagtattccacggtaactacaaaacattctggaaccgtgacgatatttataaatcatttggttttaataaattctttgatgcgtcatactacgatatgaatgaaaaagacgtagtaaactacggattaaaagataaaccgttctttaatgaatctattccgttattacaaacgttgaaacaaccgttctatacaaagtttattacgttatcgaaccatttcccttatccaatcgataaggcagaagcaacgattgaaccagcaacaacaggtgattcatcagtagatacgtacttccaaacagcacgctatttagatgaatctgtaaaaggcttcatcgattacttgaaacaatctggtttatatgataactcaattattgttatgtacggagaccattacggtatttcagataatcataatgcagcaatgtcaaaagtaatgggtaaagaaatgaactcatttgaaaatgcacagttacaacgtgtaccattaatcgttcgtgtaccaggagtgaaaggtggcgtacaacatcaatacggtggtgaaattgacgttcttccaacgctattacacttactaggtacagatacaaagaattatgttcaattcggttctgatttattatcaccagatcataaacaagtcgttgcgttccgtaacggtaactacgtaagcccaacagttactgcactaaacggcaaatactatgatacaactactggaaaacctgtagaatttacagatgaaataaagaaaaatgaacaaatggttcaaaactcactaaaatactctgaccaagtcgtaaatggtgacttattacgattctacacaccggaaggattcactccagtagatcgttcgaagtataactataacaaccgtgataaaaacaaaacgaaggtaaaaacgactccggaaggggaagctaaataaataataaaaggcgctattcatatgaatagcgccttttatttgtaaatataccatcattatgagacaaaaccagctgttgctttttgttttgcctttccgaagaaaactacaccgacgatgataataatgataaatgcccatttaacgaaagggttactttcgaaaaatccagcgaaccatttctcatctacaatcattttcgcggcagtataagctaaaacggctgctccgatcgtaatgatgacaggaaaacgatccacccattttaaaattaatgtgctgccccatacgactactggaatagacactaatagtccgatgattactaaagaaaagttaccatgggcagctcctgcaacagcgagtacattatcaatgcccattaacgcatcagcaataataatggttttaatagcagaccaaaatccttcttcggctttaatatcatgatttttgccctcagcgatcagcttgtaagcgatccaaataagaagtacaccaccaattaggagtaatccaggtatttttaataaccaaacgacaactaaggtagcgagagccctaatagcgattgctccaatggttccccaaatgataactttcttttgttggtctttcggtaatcttcttgctgctaatccaattacgatggcattatctccggctaacactaaatcgattacaataatggcaagcaaggcagacaaatattcaggtgaaagaaaatccatatacatatcactccttaagagtaatatgtgctaaagtgttgataatataaaaaaggattgaaattgtatattcaatccttttttgactgtattctgatatgtatgtttttattttgaataagtcgcttttgtagtttttacttatcgcgtttctttcttaaattgattccaagtttcttcagtttgcactataaatacgattatataacatctacttatttaaactaggttaaagatagcatgtgatatttcaaagttaaatttatttgataaaagggaagggacgtataatattgatatggtgcaagcgtgtataggttttctctataaggaaattctaaaaacgataaaaaagacttgataacctactagaggggatcaagtcttttcattacatacgattatcatgccagaagtttaatgggaagtgttcgttctcattatatgcttctaattcatatcctttttctttcagtcctttaataattccaggtactgcttttactgattgtggatgaatatcatgcataaggataacttctgttgggtttgtagaatgagctagaacgttttctacaattttagctgatgcagcatcaacttgcattttgttatatttccagtctaaagaatcaattgtccaatcccaaacttttaagccattgtctacaactttgttgcgaagagcttcgtttaatcctggcatagagccgtaagctggacgagttaatactggtgatttacctaaaacaccagcgattaagccttggtcttccttcatttcatctacgtaatgaccttcagtataaagtttcttgtagttatgagtcatactgtgcatcccaacgtagtggccttcagcatcttcgcgttttacaagatcagggaaagcttttacgtttgaaccaattaggaaaaatgttgcttttgcattttctttctttaacatatctaaaagctcagctgtgtattttccaggaccgtcatcaaatgttaaataagcgacttttctaacttgcccgttataatgttttggagcttctttcggagcaagagatgtttgaatctcacttacaagttgaacagattttgcttcatcctctgtactagctaaagcagtatgtactgatccaaaagccgcttcgtatgtgaataatactcccgcacaaactaacatagccctttttactaaagttgtcattcgaattccattgtgcataattttccttctctctataaaagttctactctactatattagcaattataggtagggaaatgcaaagaaacttttttacacttgtaaaaaagtttacccaaaagtatgcaagattttatatcaattgcagttttgaaaaatagaatgaatttaaactttattatttaaactttcaatcaccaaatcatactttcgtatcacttcgttttcgttccaaatattgattcgaatatttttgatttttattaaaatattcgtaaagaaacaattatatgaaaaaaggagcgggaatatgaataattatatttgcactacatgtggagtacagtatcccgaaaatgaagaagcaccttctcactgtaaaatttgtaatgaggaaaggccatatgttaatccaattgggcagtcatggataacattagaaacaatgcaaaatagcaatttatactaaagacctattgtttattaactaataggtctttcaacttaggaagctcacactaatgagggatgttaaagggaatatatctaacctatactaattactataaagctttggaaaatgaaaaggaggagatttgcatgaagaattgggttcaatttagaattgcaagaccaacagataaattggaagaagtgattagtttttatgaaacaggattaggattaaaacgtataggggaatttcacaatcatgaaggatatgacggggttatgtttggattaccagatgaagagtatcatttggagtttacttcacatgttaatggaagtccatgtccggcaccgacaaaagataatttactagttttttatatgcctaataaagatgaaattgaaaatatagtaaatcaattaagtaatatgggctaccatgaggtggaaccagaaaacccgtattggatagagaaaggaaccacaatagaggatccagatggttggagaattgtgcttatgaatgcatctgaataaggaaactattttcatatgaaatagagtgtagcaaaatgatttagacataaatccctacagcgtttgtagggatttttatataagaaaatcttattgagagagttattaaaatgtagaaagtattttggctaagaataaatgtagtaaacataatttatgaaggaggtataaaagtatgatagtaaaccattttaaggagttttctaaacatgttggaaatacacatctcattaaaagttctttcgtagtttatatcttattctacggaaaattgataccatcaaaaaactgtatgtttaacatgtatagttttttgatggtgtagctgtgcaatgtttaaaaatttcacataccgtattttaaaaataaatataggaaaaccaaaaagtaatgtagaatatatcgtacatacatatatacagtcaacataaaagataaagaggtgggtatatgttacttgaggaagtaatgcagcaactagaggaatatggaacagaacaaaatcgaaaaacgtataaaaaccacggagcgaaagagccgttatttggagttagttttgcgaatttaaaattgttaaaaaagaagataaaaaaagatcatgatttagcagttggattgtgggaaacgaaaaatatggacgcaatgacattagcaacttatattttagatccgaaaaaaataacgacagaacagcttaatagttggattcaggatgttgattattactgtttgatggatgttcttatgacatctatatgtacttcgccaattgcaatagaaagaatggaagagtggacaaagtctaatgatgaatggattggaagagctggctggtctttattagcaaatatagcgattaaaaataaaacgttacatgatgatttcttctctccgtacttagaagagattaaagaaaatatacataatgaaaaaaatagaaaaaaagaagcgatgaatagtgctttaatcgcaataggaattcgtaatgaagacttagagcgacaagcgattgaaattgcacgtgaaattggaaaagtagaggttgatcacggtgcaacatcatgtaaaacaccagatgcagaaagctatataaaaaaagcgagagaaagagctgaaaaaaagaaagtgaaataagaaaagaggatcggttatgaaagcaattgacgcagcacaaaacataattacattacaattttctaattgtgatgtagctttactcggcggaagcgttgtacgaggagaagcgacgaaaacatctgaccttgatattgtaatagttgaccaaagtttaacttcttgctatagggaatctttctatagtaatggatggcctgttgaggtgtttgttcataattttgaaacatataaaacctttttcaaaatggattgtgatcgagggagaccgtcgttaccacaattagtttcggaagggattgcattaaaaggggaaaaggaaattgttgagaaattaaaaaaagaagcgaatgatttactacataaaggaccagctaaatggaccgaagaaacgattaagcagaagcgatattttattacggatactttagatgactttattggtgcaacaaaaagagaagaagaattgtttatcgctaatttattagcggatttagtacatgaatatgtattaagagtaaatggtaagtggcttgggagttcaaaatggtttattagagtgctaaaaagatatgatgagcaatatgcaaacaaatttgtagcggcttttgattatttttataaaacgggagagaaaaatgaattaattcattttatagaaaagatgttagaacagtatggtggaagagtgttcgaaggattttctattggtaaataaaaaggggagagaaaaatgaatgtaccatatgttcaattaagagaattgacactagatgatgtagaagatcgctatcaatggtcattagatagagatgtaacaaagcatttagtcgtaccagatcaatatcctccgttcactcgtggagatacgagaaactggattgaagcttgtataagccgaaaaaatggttatgaacaaagggcaatcgttactgaggcaggtatacatattggatgggtagaccttaaaaattttgataaaacaaataaaaatgctgaactaggaattgcgattggaaataaagactattggggtaaaggatttggaatggcagctctaaacagcatgttacaaataggtttttctcagtttgaattggagaaaatttggttacgtgtagatgaagataatacaaaagctaaaaagagttatgaaagtgccggatttgtatgcgaagggttaatgagaaatgatcgattgagacaggggaagttcattcatcgcaatcgttacagtatattaaaagaagagtatgaatcaaaaaaagtagcctataaaaatattatgtaaattaaaaaggggaagataaaatgattcgattacttacaaaagcggatgcaaaacaatattgggagttacgtttacaagcattacaagtaaatccagaagcatttataacgacttatgaagaagcagtacgtcaagaaaatcctcttgaacgagttgctagtaatctttcatccaatagtagttttacatttggtgcttttaataatgaaaatcgtttagttggggttgttactttattaacagaagaaaaagacgcatataagcataaaggacatatcgttgcaatgtatgtagatactgaaaatcgaagaagtggtcttgcacgtgatttaatacgtaaagcaattgaaagggcaaaagagatgaagctagagcaattgaatttaggggttgtgtcaacgaacgaaccagccaaacgattatatgaatcaatgggatttaaaacatacggaattgaaaaaagggctataaaaatgaatggtgtgtatagtgatgatgaacatatggtgttgttcttttaagagaggaagttttgtatgaaaaaggcgaaactgcgacaataagatggtgaatatggcatatagcagatcataattggtatcatcaagctcatatcagtcgtttgaggaaattatacagagaatataaactacatattctttaatttttgaatgaacgaacgcccctaaataataattaaaggaggcgtttgtttttattcgttcgcttttcttcccaagctatcattaaatttttatgataatcttttggtttctcaatagaaaaccagtaaattgaatgtgcaatagttggtagccatcttttatagcggatgtgtatattttcatggtgagtatagtgggtcgagattaaagtagattttgacccttgaaaattttgatatgtaatggcctcgatttcataccaatgcactttattcccatgtaaatctactacaattccttcatcatcccaaagtgaaatgtaagtttgtatgtagatttttcatcgcgtatactaaaatatatgtcatagagataaaaaattaaatacaaggggttttacaatgaaagcaattgttatagggatattggcatcatttttctttgcctttacctttgttttaaaccgggcaatggacttagaaggtggaagctggatttggagtgcatcattacggtattattttatggttccaatgctattacttattgttatgtatagagggaacttaaagcaactctttcaatatatgaaaaacaatccgaaagaatggttagtgtggagtatcgttggatttggtctcttttatgcaccgcttagttttgctggagcgttcggaccaggttggcttgttgcatcaacatggcaaattacaatcgttgcagggattttgttaacaccattttttgcggtggatccactacataaaaaacttccgatgaaggaattagttatgtcgggcattattttattcggtgttgttctcatgcaagcagaacatgcttcttcattaggtattcgtgaaaccgttttatgtgtagttcctgtacttattgcagcatttgcgtatcctcttggaaatagaaaaatgatgcaagtttgtaaaggggaattagatgtatttcagcgagtactcggtatgacattagcaagtttaccattttggtttttattatctggttacgaagtatcaacaggcggattaccgtcaagtagccaagtttttcaatgttttattgtagcagttagctctgggttaatcgcgacagtattatttttctttgcaacagatcttgtgaaagatgatccgcaaaaattagcaacagtggaagcgacgcagtctggtgaagttttatttgcgctagtaggagagctgatctggttatctgcaccaattccgtcatcattatcttggattggtatgagtctcgttattattggaatgatacttcatagttatgtggctgtcgttgtaaaaaaagaagaaaaaataacggcgtaatgagattagctctttttattaagagttagtctttttttcatagaaagggatgaaaatatgaatttacatcgcgttgaacaaattgaaaaagattcaatattaaatgtgctacaatatgccgtcggtccaaatgaaataagcttaaagaaagcagtattattttatcaaagtaataaagggactttgtacaaatatgaagaaaaagcttgtctaggtattgaagtaatcggagcaactaaagcacgagtatgtcatatagcagtggctccagattatcgtcaaaaaggaattgcactgcaaatgattaaagaagtggtaaggatatatcaattgacttatatagaagcagagacagacgatgaggcggtagaattttataaaagaattggttttcaagttaaaagtttaggagaaaaatatccagggatagaaagatttcattgttacatggaaaaatagcatgaaaatatacaattgtacatattgaatatagtttgaaaaaaataataatttcattatataatataggtatctggaaaaatatagataaaagaagatgggtgtataacaagtgagaatggataaaagtaagtttataaaaatagctacttcaataggggtgtcatcttttttattaacaggttgtggtgattatgaagaagaaactgctcagcaagaaagtacagctgttaaaacagatggtgcaaaacaaagaaatgaacaagaaacattaaattgtgatgataaagccccaaccaatgaaaatgtagagaaagatgagttatgcaaggaaaataatccgtcattttcatcttatcatgaaaactctcatttaccgatacttccatttgtagcaggatatttattagcgagtagaacttcaaatatgaattatacagcaaaaccaaatttaatgaagaaaccgtatgcaaataatgttattccatatcgtgaaaaagatgagcgtagaacaggtggcggtagtagcggtggttatactggtggttctaacggtaacaataatacttccaataaagtagatttaaataaacagcagccaaatccatccaataaagtaacaccagatacaaatacgccaaaatcatctactacgcaaacaccgaaagtaaactctggttcaagtggaattggaaacgcaaaagcgccagcaggatcctaaaacgaaagggtaatggagtaatgtatacagaacgagagcaagaagagtatatgaaagtatggttttcacttgcagaagaggctagtaggaatggtttcacttggcctagtctgttagagaatgaagaatggaatcaatatatggcaacagggatgtatcgcatgccagcaaaaacttatactgctatctcaaaagcgacagaagaaatcatgtatgtgttatatagaacgtatcaatatattgtaaatacgacagaagattttcaaaaacttggattcccagctgaagcgtgggaaatggcgagaatgaaacataatggtttattttcatattttacaaggtttgattttatcgtaaatggtgacgatataaaattaatagaagtaaattgtgatacgccaacaggctatttagaaccgtctgtcgcaaatgaagtgttatgccgttatcatgatgtaaatcacccaaaccatatagaagagcatattgtgcaggcatgggaacaaattaaacatgactatcatataggccctgaagagacgatatattttactagttatgattggcacgatgaagatagtcaaacggttcagtttttaagaacgtattgcttaaatcagtcaacggactatgtaggaatacaagacattgtcgttgcggaagatggtatatatacgccaagtggagaaaaaataaaatatttatatagactgtatccaatagagtatttagtaacggacgttgataagaacggaaaaaggattggtttacaatttttagatcatattgcgcaagaaagagtgaaaattattaatccgccagccgcgtttgttatgcaaaacaaaagtgtactcgcactaatttggaagctttatgaagaaagtgttttctttacagaagaagagcaagacattatttataaatactttctaccaacatatttttcaaataagcgatttctagaaagacatgaatcatacgtttcaaaacctgtatttggtcgtgaaggtggcggagtatctatatacgaaaatgatgaattattagctgaagataaaacagagtattactttgaacaaaggaagatataccagcaatacatagaaatgcctgactataccattgacacatgggatggtccatatactggtaaactattaattggctctcactgtataagcggaagagcagcaggcttatttttacgtgtaggtgagaaaataacgggaaacttatcaatgtttactggggttacaattgaaggataaagtaaacaaagagctcatcatttgtgatgagctctttcgtctatgtataaaacagctttttatggttggatgtaaaatcttcactttctttttgtgttttaaatctgaatattataattcaaatattttttgtgtaataatattactattttttatagatgtgaaaaatgattaagttaaaaattaagaaaaatatgataatatatttatataaaagtttaaatttacgtagctagtgggggaaccaatatgaaaatgaatgaaatagtagcaagtacacaatttccaaatacaatcgaaacaataacaaaagatttaaaagcattaggagtcgaaaaaggaatgacaattatcgttcattcatcactaagttctatcgggtggatatctggtggtgcggttgctgtagtagaagcattaatgaaagttgttacggaagaaggaacgataataatgccaacgcaatcttcggatttgtccgatccgaaacattggtcaagaccacctgtaccggaagactggtggcaaattatccgagataacgtcccagcatttgattcacgtataaccccaacaaggggaatgggtgaaatagttgaatgttttcgtacatatccgaatgtagtacgtagtaatcatccgttaggaagttttgctgcatggggaaaacatgcagtagaaataacaatgaaccattcgttatcaatgagctttggagaagaatctccattaagaaaaatatatgatttagacgggtacgtattattaattggtgttggatatgattccaatacgtctgttcatttatccgaggtgcgttctggtgcatgtgagttaatacaagtaggagcacctattatagaaaacggtgaaagagtgtggaaagagttttttgaaatggattacgaatctgagaagtttgtagaaattggtgtggagtttgagcgaaaaggaactgtaaaaaatgggaagatagggaatgcaacgtgtcgtctaatgaaacagcgtgatatagttgactttggaacagaatggtttcgtaagaaaaattagtaagggatggttacaatgaaggggaaaaaggtattaattacgagcggtggttgtctagaaaaatgggatcaagtacgcgggcatacgaatatggccaaaggtacaatcggaaggataatcgcagaagaacttctagctaaaggggcacatgttatatatttacacggttattttgcggagaaaccgagtgatgtacatagagggttagaattacatccatttgaaggaatcgttgatttacaagataaaatgaaaagtatcatatcacatgaaaagattgatgcagtcattatggcagcggctggatcagattggattgtggagaaaatttgtgatcaagatggtaatgttcttaatatgaacggaaaaatttcaagtgatatagcaccgattattcactttcaaaaggctccaaaagtattaaaacaaataaaagaatgggacccagaaacagtacttgttggttttaaacttgaaagtgatttaaatgaagaagaactgtttgaaagagcaaaaaatagaatgaaagaagcaagggcgaatgtaatgattgcgaattcaccacattctttatattcgcgcggagctgtgcattatgtaattggacaggatggtaaagggaagttgtgtaatgggaaagatgaaacagcgaaagaaattgtcaaaagcctagagttattatgtaatcgtgtcactgctttttaaaattaagtttttagatgagaatgaatccgcatagtaataagtaagcgaaactttaattggtgggaattttacttttacacgaatgtgaagcgtataccaatcaagagctatacacagaataattggtgaggagtggattctatggaacatttattaaagcaagctattaaacttagaaacgaaaagaaatatgcgcagtctaaagagatgcttataggattaacaaactttacaaaggatgcagaagtactgtatcagtgtgcgtggatacatgatgtaatggggctagaaacagaagcagttccgtattatgagcaggcaatcgcaaatggacttgatggcgaatcgctttgcggtgcttatattggtttaggaagtacatatcgttgtataggggaatatgaaaaggcaattacagtattagaagctggggtgaaaaaattcccagagaacgctccgatgaaagtatttttatcattagcaaaatataacgtaaacgatcacgaatcagcgatgaaattattacttgaaactgtcgtgaaagtagaggaagtaaaagaatttgaacgtgccatttcattttataaagaccatttaaatgaggtttttaaataaaggagtgaacgtatggaggttacactatcacgaaggcgaaaaggtgtttggattggactcgtatctttaattatgctattaaactatttattgtatgcccttccaattgtaccagttgcgccgaaagaagttgtgcttgggtcattattagattgcatgtttgtcattccaatcatcacgtatttcttcattattcgaaaaagatactcgttaacgtatatagttcctgttgtaatagctggttatatttttgcaagatttattattccaagtgactatttacaagctttttcattcatctcttatattattgttgcggctgaaattgcatttgtaggtctagaattattccttctctataaaattgttagagtgcttcctaaaataataaaaaaatataaagaatatagaagagaaaattattccttttcttatgcaattgatgcagcgtttgacgctactatgaaaagaagtaagttagtagatgccattctaacagagtgtaagttaatctattatgcgtttttatcgtggcgtgaaaaagtaccaacaggtaaatctgtatactcatatcataaaaagactggtgctataggtgtgtatatcatgattattcatgcaacaataattgaaagcattggttttcattatttactacatcagtggaatccagtaatagcatggattttacttattttaaatgtatacgcgatgatttattttatagctgaaatacaagcgatgcgcaaaaatccccttgtcgtaacagaagaacaagtagtcattcaaatcggattaggaaagaaaattgttatgccatttacacaaattgataatattgcgttctacaagggtgaattgctaacggcaaaagaaaggaaacaggtattggatgcaactgttatggagttcataaaagaacctgctacttttgaaataacattaaaagagccagtgaaagcgcagttgttatacggcttttctaaaacagtaagtcgtgtttacttaaatgttgatgaagaacgaaaattttatgatgcggttaaggaaaagttaaaacatgagtaatagtgctgttagttacataaaaacaaatgagcttccgttagaagtgaaaaaatatgaaacatggatagtgaaaaactctttctaaataagaaggagtttttattatatacttttataaaacattatataaaaaactatacacttctttatcactacataaatggatataattgaggatagaactagcataaggggaaacaaaataatgaataagttacttacatcgaaaattgaaattatagaaagaaaaatccggtataactcaacaatagtagatcacaattgcttattacttgaaaagcaatcacaaagtatcgttttatttcacgaggtgcagtattcatttacaatgactgcaaatgatactaagttaacaatcccaaaaggaagttatacaatcgcatattactggaaagatcgtccgtacaatttatacgtatggagagatataaaaggaaagtatttaggttcctattttaatattgtaaaaaacacacaaataaaagatgaagtggtttcctttgaagatttaatcatcgatattatggtacttccaaatggagaatacttcatattggatgaagatgaattaccagaaccattagggaatttcgaaggtggttatgtgaggaaagctctttatggattaaaagaaatcattcaaaaagagctgccaccaatagttttggagacagccagggtgcagaggaaataaaatttaattacataaatattttgaatgggaatgagtagtctcaagttatatgatctaacttttttaataaatctaaggttagtagcatatttcttgaaattactcttttttttgtagaaatttcgtcgcttagttattaaattccatcaaatgcatttagcgtgtgagttttcttattggttacagtggattaaaaatcagaaaaaatagtaagtaaatgatatcgttcaaataaacaacagtaaaaatattcaaacgaatcatatgtatgttttgataaaacctagttgacttatcggaaatatttgtataatatgtacttaattccataacgtattgctgattggagaaaccaaaggcattttatctgttgataaaatgcctttggtttttttattgcacaaatactgaatctgttcatttatatgaatcattttaaggaggagaagaaatgactgtttcaattgatggggtatcaaaatattttttgaaacaaactggtactgttcaagtattagagaatattaattttcaattagagaaaggggattttgttacagtaattggtccgagtgggtgcggaaaaagtacattactaaaaattgttgccggtctagataatgattttgaaggggaagttgttattgacggggagcctatcttaaaaacgagcaagaaacaaggttttatttttcaagaacataggctttttccatggttaacagttgaagaaaatatagcggcagatttatcgttaaaagataagtatgtgaaagataaggtaagagaatgggttgaaatcgttcggttagatggctttgaaaaatcgtatccgaaagaaatttcaggcgggatgtcacaacgtgttgcgatagcgagagcgttattaagagatccaaatgtattattacttgatgaaccttttggagcgctggatgcttttactcgaagtcatttacaagaagtattgctaaatatttgggagcagaagaaaacaacaatgatattcgttacacatgatatagacgaagcgatatatctttcaaaccgaatcatcattatgagtgcaaaaccagggaaaatacataaagtgattgaaaataatttggcttatccgcgaaataaaacttctcaatcgttccaacaacttcgaacgaaagtattacagcagtttgaatatggagggttgattcaaacaagtatataggaaaagggtgattttatatgtataaaaaattaaaaattctttcttttgctttagctatatcagtatgtttgttaggatgtgaaaaaagtacagcaagtagtaagaaagaagatgtaacaatacaaattggtatacaacaaggattaagcccgctattactagcaaagaaaaaggggtggtttgaagaggagtttaaaaaagaaggagttaaagtgaaatggacagagttccaaagtggacctccttattttgaagcaatcgcatcaaaccgattagactttggtgaagtagggaattctccagtcatttcagcgcaagcagcaggtattggatttaccgaaatcgccaatacaagttatgcgagaaaaggaactggaattctcgttcaaaaagatagtaagattgcgagtgtaaaagatttaaaaggtaaaaaaattgcagtagcaaaaggaagtagtgcctttaatttattatatcgagcacttgataaagaaggtattgatgcaaaagatgtaaatgtcattcaattacaaccagatgaagcgcagcctgcattcgaatcaggatcagtagatgcatgggcgatttgggaccctttcatatcattacatacgttaaataaaggtgcgaaggtgattgcagacggtgaaacattaaatgtctcttcaccagaatttttaattacgaggacaaaatttgcgaaagaacatccagaattagttgagaaattcctcaaagtttatgagaaagcacgtgtatggcaagatgctaacttagatgaagcaataaaagtatacacttctgtaaaaaagatagatgcgaagatcgtaaaagaagtgtttaatcacgacaaaccaattttagttccggtaactaaggaaataatagcagaacaacaaaagactgcggattttcaatataagctcggttctataaagaaagaaattaagacggaaaaagttgtagataattctttcgtagaaaaagcattgaaagcgaagtgaaaagaggttttgtaaagtggaaaatacgaaagctgttatgaaaccagcgagtataacgattaagaaaaatggcataaagaaggtacgaaagttaaatgtaaaagttttagtaagggcgattactataccggttattatattaataatttggcagttggctggcgtattcggtcttgtttctaaaacagttttaccaacaccattagatatttttctagctttccaagagcttattaaaacaggagagttattcggacatttaagtattagtgtattcagggctgcggctggtttctttattggtgggggcttaggaatcattttaggaacgattgttggattttcaacgagaagtgagcaatatttagacccatctgtgcaaatgttaagaactgtacctcatttagctgttgcgccgctttttgtattatggttcggttttggtgaaacatcaaaagtgttattaattgcagatggtgcattttttcctttatacgtaaacgcatttttaggtattagaggtgtggattcaaagttatttgatgttgcgagagtgttagagtttagtaaaagaaaattaatcacgaaactaattttaccagctgcattgcctaaccttttactaggagcaaggttatcgttaggtgttgcgtgggtgagtttagtagtagcagaacttatggggtctacagaaggtattggctatatgattatggatgcaaggcaattttcaaatacagatatcgtatttgtcggcataattatatttgcatttgttgggaagttttctgactctctagtacgtttactagaagtgaagtttttaagatggcgagataactttaaaggtgagacagggaattaacatataaattattaggggtaatttatatagaatgtgttagtatacgattcaaaataaataaggggtgtgtaaaggtatggaattattatggtttattccggcttatggagatggtcgatatttaggaacgacaaaacgaggaagagcagctgaatatggttattataagcaagttgctgcggcagctgattatttaggatatacgggtgttttacttccaactggtcaaggatgtgaagacccttgggtgttagcttcagctcttgctgctgaaacagaaaaactaaaatttttagtagcagtgagaccaggactaatgtcccctacagttgcagcgaggatggcatctacatttgatagaatttcacatgggaggctgcttattaatgtagtagctggaggagatccagttgaactacaaggagatggattatatcttgatcatgatgaaagatatgaagcagcggatgaatttttaaaagtttggaaatcgacattgcaaggtgaaacgatctctttagaaggaaaacatattaaagttacagatagtaaagttgtattcccaccagttcaaataccatatcctcctatatatttcggaggatcgtcaactgctggaaaagaagtagcagctgaacatagtgatgtatatttaacgtggggagagccgccagagcaagtgaaagagaaaatagaagaagtaagaaaacttgcagaagagaaggggcgtacagtgcgatttggcattagattacacgtaattgtaagagaaacagaagaagaagcatgggaagaggcagaacgtttaattcaatatgtggataatgaaacaattgagcttgctcaaaagacatttgcaagatatgattcggttggtcaaaaacggatgacccatttaaataaaggtacgagagagtcgttagagataagccctaatttatgggctggaatcggacttgtaagaggtggggcaggtactgcacttgtaggcgatccgcatacagtagcagaaaggataaaagaatatgaatcgttaggaattgatacgtttgttttatcaggatatccgcatttagaagaagcgtatgaagtggcagaattgttattcccattattgaaagacgagaagaaagaagaaaataaaattgttggtgaaatgattgctgatgcatatgcattaaaaaaatagtgagaaataaagtttcacttatttattgcttcattttgtttactgcctgttaacacgagataaaaaacccgcaagttattcgcttgcgggttttcatcgtaaattattagaaaatatggtaaaattaaagggtaacttaaggtgcggttggttgttcaattatcacttctccgagtaggaggggggtgataatacgtgagtgaaatagcgttgctactgcagggtggactgtttctcgttgcattgttaacgttcgtcgtcgttttaatagacaagctcaaaaaataacaacccacctatgcctatagaatgtgggttgttttgtttgtaagaaacaaataggataaatgaacaatccaatctgctaagttacgtggactagtgtgtagccgcacactagttttttttatttatatacaatttataattggtttatgtgattgtattgttcttttcatactcattataacacagtgtcttttcatcaagaaaggagaccgtatgttctggtctctgttatatagtaggtgctttttctttaaacagcccatccatatactgttttaaactttggacataaaatttttgtgtattcacattatttacaccgacaatgggtgatggaaggtcaaatcttttttctgataaatgaacgacaacatcaaaaatgtcaaacaaacgaatgaagcaaaacagaccgtctttatcgctaagtaaaataaagtaatgattttcactacttgtatttagcgtattccataaagaacttttgcttaaatcacgtacaatgcttttttcttttagttccacgaaatctgcatttgagagaatggtagagatatcaatcgcatcttgatcttcaaagtagccatcaactgtttgtacagcgaatgtataagccatttttaatatactcattttatatttacggttatccaatagcaattcacgttgaatagaactggctactttcgttacacgttcctctttccaaatttcattatgtaaggaaatatcgtgctttttacatagtttcataattaatgcattagaataaagaatttcgtcgcttacttcgacaacatcagtctcagcagccgcaagttcctcaccgtgctcatttgtatagagtggggaatcaatttgtcttttcatttgttcaatcttaaattgactcaatttatgcctaattaaaggacgatcaatatttgttgtcatttgttcatgacaagtatcacaaattgagtttgtgaaataatatccacataatatttctggaatgacatattgttcactaagttctttcgtatcttttctgcaaatgatgcattgtgtcatttttatcacctttacctgcaaatttgtatataatctcattgtagtgtatttattggtattttggaatattgtaaaggaaaatattatgtgaaattcatacttattttggtacaatgaagagaagtgctagtttaaaggaggccatttttttgaaatcaaaagtgcacttttggacattagaagtgctaatggttgtaggaatcatatttatttgcacaaaaatatcatttttatttcaaccgattggtatcttcatatcaacattatttttcccaatcttaatcgcgctttttttatacttcatatttaatcctgtattaatctttttggagaataaaaaagtacctagaaatttagcgatattgctgttatatctttttatcataacattaactgcggttggcgttggagtagttgttcctacgatttcacaacagctaatggacttagtaaaaaatatgccaggctacataaaagagggaaaagtatacatacaagaattatcacatcataggttgtttgaatggttatctacacaaaactacgtttccattgaaacaattgaaaaaaatgcgattgaatacttaaaagatataccaaatacaattacgtcgagtgcaacggctttatttggtattatcacgaacgttgcattagttgtatttactgtaccgttcattttattttacatgtttaaagatggacatgcctttccaggaaaagcggtaagtttattaccagagtcttaccgtgaagaggggcttcgtatcattaaggaaacgaacgaaacattatctgcatatattcaagggcaagcgctcgtttgtatatttgtaggtgcgtttacttttatcggttatttaattatcgatttaccgtacgctttcgttttaggaattattgcagcatttacaaacattattcctaacttaggtccatttatcggagcagcaccagctgttattgtaggactgttcgtatctccgatgcaagccttatacgtaattattatcgtaacaattgtacaacagtttgaaagtaatattatttcaccacgtattatgagctcgaaattaaacatccacccattaacaattattatcctaattttaggggtaggtaactttgctggaatcatcggaatgattttagcagtaccagtttatgcagtaacaaaaacagttgtttcaaacttagtgagattgtttaaaacgaagagaagtaatcggaaatagtaaaacctgagaaagatacacctctatttaagtggtgtatcttttgtttataaaaaaataattaaaagcgggttgatatgattttattatatattttttatacatcaaattcagcgatgaacttgtgtgatataagctctataaaactatgtggaatccctctgaactatccaaatcatttccttacgtgctatcatcatcataatcgactcctttcaattctatatagttaaacgattaaaggtgagtgtagtatttgcttctacgatctcgaatttcatcaataacttgtttatattgtctttcttgttttaattcattttgagatattgtttctttttgaatcgtaatcgttaaaaagaataggtgaaacttcatatgtgaattcctcctttcgaattggaattacagatgactacagtaatgactttgtctttcttttacagaatccatagcctgattaatttgtcgctcatgaagcatttcagactcggaaaatttatttttttgaatggtaatggttaaaaagaatactttaaatttcataaaataattgcccctttataagtgatttagaaaaaacgagtgtaataagaaattacaggtgactacagtaatgactttgtctttcttttacagaatccatagcctgattaatttgtcgctcatgaagcatttcagactcggaaaatttatttttttgaatggtaatggttaaaaagaatactttaaatttcataaaataattacccctttataagtgatttagaaaagacgagtgtaataagaagattgaagctcttttacttcgtccataatattttgaatgtgttgttcacgtaaaatctctttctgtgagagcttacgtttttgaatagtgattgttaaaaagaatgctttaaatttcatgaatatattacccctttaaaatatatttttaatacatttgagtgtagtatgaacttttaatgtcagttattttatcagtcagttgttttaactgttgtttacgattgatttcagtttcagataaagtatttttttgaagtacagtcgtaaaaaagaaaatatgaaaagtcataaatgaattcctcctttcgaaaaggaattacaggtgatcacagtaaagtgcttggcgctccttaacatcattcatagctttttcaatttgctcattatgaagaatttcatctttggaaattatatttctttgaatcgtaatacttaaaaacaatacgctaatagtcattgaatgttgctcctttcttagaaaaataatgtaagagactaaaaaatcgcgcaaaaaaaccacaggaagatacagttctcctatggctgggcgtgaaaaagccacaggaaagtatacggcctcctgtggcgaatttatgaattaaatgaaataaagtacgattttcaattctccattagggtggtcgaattcatatttaattgtccagaaaacacaggtgcagttaacgctaaagttaatgcatgtaattgtaatttcatcatttccttcgacctccttttagaatttttttcttacgttagtaagtatatacaattaatggataattgtaaacataaaaaatgaaaatttttaattttgattaaaatgcgtatatttaaaagggatttgaaagtaaatattgtaattaacgaaatatcgataaaaatgggggatgctaaatgaaatatatgcatcataacatgatcgttatgctaacaatttttttattcattgcggcttgttctaatggagaaagaataaaagatatatatgatattaggtcagatgattttaagaaatatactgggacatacgttggtaataattcagatgtggttgcaattgttaatcatttacccggtggtggaacagttcaaagtataagtttagaaaatgaaaatataaaagtgaactatggcgcaaaagaaagtggggctcttacagaagaaatgattgagacgtattggtttgatgagaaggatacgatgaagaagaattttttctttaatgctatatatttagtgattttagtgccaaatgcaaaaagttatgagtttcaggtagagaataaaaactttaagataacgagggaagaaatgttatcaattttgcatagaatattcgatgattttccaaaagaaaaagatatatgggataaaaataaagttataaagttctttaacggcaatgaagaaaaaattaaaatgcttgtggaagataaagattttcggaaatctttatttgctaaatatccagtgagccagttgaaataatggaggggagaagatggagttagtatacaaaatttcttatcatagaatgcaggatcattatttacctaagttagtacaggcaattaggctcgttagtgaagaagatttgtggaaacaagagaccgctgttaattcaattggtggaatcgtactacatatttgtgaacatttacagagaaatacaaggcgttataaggattccaatatagtttttgaaaatggaattgaagaatattttccaataaaacatttaagctccgaaactttgttaaaaactgttgaagaaatatttgatgagtggggaaaagtatatatacaagtatgggaagaaaaaaggcatattgatcttcatagtttattacatttagtggagcatacaagttatcatttagggcaaatagtagatcgtacaaagtcaataaagggacaacaatttaacttttgtcaaaatggtataaatgaaaagaatttgagaacaagagttgaaacttcgaaattttagaaagagagtcattcttaaacgaatgattctcttttttgtaaaagaaatttatggaaaaaaacatttttatgtgatatggttaattacataagtaatgaacctatgaacctaaggtggtgaaagtgtgaaacctactctggagcaaaataaattaatatacttacaaattgcagaaacgattgaatctgatattttaaaagacatattgcttgaagaagaacaagttccatcgacaaatcaatttgcgaagatgttacaaataaatccggctactgcagctaaaggggtgaatgtattagtagatgaggggattttatataaaaagagagggatcggaatgtttgttgcaaagggagcgaaagaagtcgtactaaaaaaaagacaaaatacttttatgactgaatatttacctaaagtgtgggaagaagcgaaagtactagaaatatcaaaaaatgaattgatggatatgattcaaaagattacgaaggaggggaaagagggatgattgcacttgaaacgaaagatgtaacgaaaaaatataaaaagaaaatagctgtaaatgaagtaacgatctcattggaagagcataaaatatatggtttgcttggaaggaacggagcagggaaaacgacactattaaatttacttgcaggtcaaattacttcaagtagtggaagcatatcaatatttggtgaacatgtttttgagaatagtaaagcgatgcaaaatatttgttttgttaaagtgaaagaagctgcatatctaaataataaagttaaagagatttttaatttatgtaacatgttttataaaaactgggatcaaaagtttgctgaagaacttgctaggaaatttcaacttaatttgaaagaaaaatatcataaattatcacacggaatgcaaactgttgtcggaatcattcaaggattagcaagtagagcacctattactatttttgatgaaccaactacaggtttagacgcagcacaccgtgaattattttatagtctactactagaagattacggtgagcatccacgaacaattatattatcaacacatttagtagaagaagtaactcatgttattgaagatgtaatcatcataaaagaaggtgcacttgttgttcaatcatcagtggaagatttattacgacaaggtcatattatttcaggaaaaaaagataaagtggatgagttttcaatcaataaaaaagtaataaatcgagaagtttatggaaataagaggatttctgttatatgggaagaactttctaatgaagattattactctcttgaaaaagaagggttatcaattgatagaattacattacaaaaactatttattcatataactgggggtgaaataaaatgacgatgttaatgaagcagttgaagttacatataaaatatcagtataaagccattcttatcttttggactgtggcattacttataaaagggacaatgactgcaactgatttaaagggaataaaggtagcatttttacatgatattttcaataattcatcaattgtaatcgtaatgtttattgtgataagcgtgtttcttattcaacttgatatttttcctacagtcgtctcgtttggtgtcactaggttgcaatttttgattggttcaatatgttttaatttattgcaatcagcattgttttcatgtcttcaagctttgtttttacaggatacattttataaaacagaacatgtaaatttaggagcatctgcaattgaacaattctttgtacaattcatattttatagtacattagcttgtttattccaatcaacaactattgttcagaaaagatttaattggttcggattggcctttagtataatagttttattcggattggcgagtacaatgtatgcagggataggtataaaagagttggtgtttattaatagtaaaatgttactagaaatacctaatttcatattagtttcaatagttcttatttgcatatatattgtaattagcgctctatttattcgtaaggtttcgtttgaagatacaatttaaatacaattattttaggggagaaggaagagtgaatgggagatacttcttcattaataaccgtttttttatgcattgcactactaatattttggcgtcgttatcgctccatgtataagccaataaagggatcgggaaaacgtattttatggccattactatttttaacaccaggtattgtatggtttttaggtcccgtacatccagctgtactacaagtggctatagcagcatttattgggattcttttctctgtaccacttatagcactaacaaattatgagcgaagagatgatgggaatatttatacgaaaaaaagtgcagcttttttaattacttttattgcacttgtcgttttaagatatggttcaagacaatttatcgttgatttagatcaacaaacgattggtttattattttacgttgttgctgtctcgtatattattccatggagaattgcttgttatataaagtttaggaaagtttggcgggaaaataataatcatgctatatgaaaacttctcatttgagaagtttttttatttttataggtaagcaaaacaagttgttgaagggcaggctgtcatagaatatgatacatattataatgaggaaaagttgaggggataaaaatgcgtacaattttactttttctaaacaacatgtccatcgataaaatagagaacattagacataaacatgatcctttatttggattaattccaccgcatataacaatcgtattcccgtttaagagtaatatttcaaatgatgaattaaaatctcatatttttaatgtatcaaaagggggaggcaaaattgaaattgagtttgcaaatcgtatcattagcgtaggaaactatttgtttttagaagttgatagaggaagaaaacaaatagaagaactacatgataggctgtatacaggacctttattacaatttttgaaagaagacattccgtacatcccgcatgtaacagtcggaagaaaagaaagtgccaaattagctgctgaagtagtgaaggagattcctagttttcatgggaagttaaattgtgtgattgatagaataagcgtggagcgaattggagagaacggggaatcaattattgaatttgaagtgccatttttaaaaagctgacaaaagtcagctttttatttcgtagcatgaagtaatgcaccaattgcaccgctattaccaccatcttgtaaaaagattggtgttttattttgatattcggtgtagctacttataatatgttgaagttgtacgttattacataaagtcgaaccaatataaataatatgtttaatgttttttgtttcagcgaattgaaggcttaatgcagtaacgacttcaccgacaagtccttgtatagtagcaagtatgtctgagctattatatttcgattctgaaatagcggctttaccaaaattgctagcagttaagttattatcgataggggaaagaataccactataaatatctccaaccgtaatatctagttcttttctagatcctacttttgttagagggattacatcttcaaaatgatttgtatttgttaacaattttgaaagtcccataatagtcccaccgccaactccggttccaccagcgcgaatatattgttcattataaacataatggatagaagtacctgtaccgatattggttaaaataaaattgtttatagtgtgtttttcttcttttaatatgtattggacacctgcaagagtagattcaaattcgtttagctctattattttatatgaacctgtaagcagatgctgtaatagtttcgatttaccacccgtaatacatatttgttttatgccattgttgtttttaatccaatctattattttatgttgttcatgtgaataaaatttttcaaaagttaatagctttttttcgttaaaataagctattttcgttaatgtgcctccagcatcgataccgatagtacgttccattttcctgctcctaactacgtaatatgttttcctatttacttaattggttgagaatagatatttccaactgatataaggaacactttaatctgcttgatatattaatagtttttctatagttacaataggctggtcgtttacagttgcaatacctttaccaagaataaaacctcggcgattgcgcgttagctcataatgtaaatcaagtttatcaccgggatatgcttttccgtggaattcaactccatctaaagaggagagaaatcctagtccttcagaatcacttgtatgtacaaatgcactaagctgggcaagtgattctacaattaacatatgaggcatatgtttttgactatcatttataaaccattcgttatttgtaatgagtttatatcctgtaacggattcaccttgttttacatttgttactttatcaatcattaaaaatggataacgatggggaagcgtgtctttaatatgcatatgaaagtacctccaattaataatacccctgctaaagttaagcaggggagtgggaactaatttttaactaattcatctactttttcaaggacgaaaatgccgctatttctaatattttcaacaacttgttgcaatacttctttattttgaacgagtgcaatacgtacgaagccttctccatgaggtccaaatgcatgaccaggtgtaacaacgacattcgcacgatccattaatgcataagcgaagtctagagaagtccatccttgtggaatttcagcccagacaaacatactaccagctggcttatcgacattccagccaaatgctcggaatccatcgactaaagtatctctccgttcttgataaatatcgcggtttttctcacaaaatgcagcgccatttcttagtgctacagatgccgctttttgaattggtaaaaatacaccgtaatcggtattagatttaaattgagtaagtgcacgaacaatttcttcgtttccaatcatatatccaatacggctacctgctaaactataactttttgacaaagaattgatttctacaccaacttctttagcaccaggtacagagagaaagctaattggcttattaccatcgaaataaaattcagcataagcaaaatcatggacaacgataatattatgctttttcgcgaatgcgattacttctttaaagaaatcttcatgagccattgctggaacgggattccctgggaagtttaaaatcatcatctttgcttgatcggcaatttcttcagggatgacttctaagtctggtaagaaatcattctctttctttaaaggcatgtagtaagatgttgcaccagccatttgaatacctgtttcataagctgtatatcctggatcaggaactaatataatatcacctggatttgcataaaccataggtaaatgaacgagcccgtcttgtgaacccattaacaataaaacttctttatccgcatttaataaaacgttatgagtgttgttgtaatattcagttacagcttcgtgaaattcttgaatacctgataatgtatacccgtagctctctttctcactcgctgtatgtaccattgtttctcttacaaaatcagcgggcggcatatcaggatttccgatgctcaaatcaatcatgttatgacctgctgcaattttttcttttttataggctcctaattcactaaatatagaagattggaatgctttcattctagttgctaacgtgtaagtcatcaaaacccctcctaaaacagtgctttcattcttcatttttaattattctgaaaacacatgtttatattttatcatttttttatgaaaattaaaacgattgacaaatttagaggaaggattagcctattttgaaaagtaacgatgtaaatagcgtagatgtgttaattgaaatgtctattataggattcattttatataacttaagatattttctagtttttattaagtatatttctcatgttttgaatgaaaaagaatacgaaaacaagggctatttttgtggacgatttctaaagtgaaataacgcagaaaatattttctgcgtctcctctgaaatgtaatcatttctttttatatgtgcataatttttcggctgtcaaaaagtatacatttaatgtaccgtcggcaacttttaaagtttggtccgatgtaaatgaattaccataatcaatgtgatatatattagaatttttgacaaatgagcctttatataaatcgtctttattctttgttgtttgcatttctactaaattttgcacaatttcctctttattttcttttttgataactgtttcaaatttataatatacagggcattccccttttttattgtcaacgacttcccaagaaccgtatatatcgttattgctgcatccactaagtaggatgattagtataggaattgtaagtagaacctttttcattttgtgctcctttcttttaaattttaataaacgtgcgaatacgatagggatattataataaataaagtttaaatttttttaaagaattatttaatttcatataaaaatttaggagaaattaaataagcatgaatctagtgtaaagtcagattcatgctagtactatagcctatgttatgtcttttttgaggataaataaagaggaaagcagaatcactattccatttaatatatatacgcttgcggtcataaaggctaacgtacctgcgccaaatcctgctttatcgaatatagaagcaaatgttgcgatagtcaaaaagataatgggagtcagtagtaaaaatatgaaacctgccacgattctttttttaaaactatgtccagataaggaaatggctaaaaagtttaggatgctaaacagagcaattgcaaagagcaggacaataaatacttcgatgccatcagacattttaccactccttttataaagagtactttttataatctattcgaaataaaagggggatactcctttaggtaatttcaataaacgtaataaataggcgtattataaaacaaagaagtatggattcaatattagacccatacttctttgtttattttataaatttgcagattgcgaatgctgtttttcataatgtttctgcttagaaagggaaatagaaataatcaataatgaaacgactccaaagatgagaaccatatattgtaacccaattgtatctaagaagaaacctgtgccaagtaagacgatttggaacataaccctctcaaacatattacggaatgagaagaggcgaccgtgataacttttttccactttcgtttggaaaatcgtcgacataatagggaagaagcagccaacactaaacccaaacaaaccaaatgatgtaagagccatccattttatatcgctaaagaacaatgacagatgtgcaaaagcagtacaaactgcgaagaaatatagtaatttttcaggtttgaaatgatcagatagacgtttaattacgaaggcacctaacataaatgcgacaccttcaattgtatatatgaaccctttaatcgtaggatcatgttgcatttcgctaatgttaataaccattaaattaaacccagctataaataatagagggatgatacttaatataagtgctgtaaaagcaataggaattccttttaaaatacgaaatacttccataaagctattatcttttgcagcttgtttacttggtgttgttgattttttgtcttcgaattgtaggaagaaagtcgagaggaataataaggcgtatgctgccattgagaaggcatacatgtactgtaaactcatcacaactaaaagaattccacctagtgaagtgcctgcaatacgagcaattgtaccaacattcatatgtacaccgttcatttgtaataactcatgctcacgtacgatgagtggaattacagattgtaatgcagggaaataaaatgctgctgaaatttgaagagcaaccataaatgcgatcataaatgcgatactttcaaattgaatagcaaaaaacatgaaaataacacttaaaactcgaccaaacccagcgtaaagaagaacttttttcttttcatactgatcgatgacacggccagccataggtccaactagaacaccggctaatagtccgataaataatataactgatttcatgaaatcagaagggacatatttttgcataaattcaaggttgccaagaataccaagccataatcctagacctgcaataaactccccaattagaacaatccaaacgtttttattacgccacataacataaaacctctccgtcttttaaaatgaaaaactcgtatataaaacctccttatttatgcattattttcatacgaacttttttagagtcagagtctatattacgtgtttcataattggatttcaatctttttgatttgtcaaaaatttgatgtgttaattgatgtaataagtgaatcaaaacgtaaaaaatttatgattaaagctaatagaaagtaaggatacatataaaaaagcaagaacgtataactacgcctcgcttttctcaagtacaaaattaaatattagattcacttagcaacatttacgctcttgtccaatagctaaagcgctaaaagatagtgggccaacaacttctgcacttgcaccactagtaaggttttctacggttaatgaatattcgtgtgttccactgctaacgttttgatctatagcttgaaatgtttgtacgtagaattgttcagaacctgttgattcaatacctacttgtgtattgaaaagttcaatattatcacgaaaaattcgaaataaaacttgggaaatctcagttataccttctacaccaactgtagcgattaattctactcgattatttcgtgaatctctacttgaaattctcaattttaaatttgctaaaattgctttatttggagaagctgggattgcaaaagttgtttcaccagttttacttataggctgagtagcttggtaatcaatgatatgagtcatattcttcacctcctcatatactagaatatgaaaatagtgaagaattagcttggacaaatactggattatttaatagagtcaacaataattattgaaaagaagaaattcacataaaagcattaagaatatatcacaataagatgatatttttcttaatgctttttgtaattaagcagaatattcttctttacgtacttcaaaaaattcattacgtcgtaagtaattataaattttctctgaaacctcttcttcttcagacactaagaaacgatgatcaaaagcgtagaaagattgacctttaattaattttacgtaatacatattaaatgcctcctgacactaaattattacttgcttcatattatgatggcctatatgtctgctaaaaatacttggagtttcaaaggggataagtaaagggataaaagagcttacaattctgtaaggtttatgtcacctttttcgatagtttgtatttaccaatttcttctataatgcaaataggttacataaaataagggggtaaaaagatggatgaaatacttggagaagttgtagctggtatttgtgaatttgtagtggaagtaacagcggatgctataggaaatttagtttctggaaatgatgaggaaaaagaaacattataataatttgtaaaagaataaagttgatcaaattataaaggctgatttctaaagggaaatcagcttttttattttttacattatattaacttaatttgaatattcatttgttatcatatttaagaagcctatataaggaggtgaataaacaaatatgtcgaattcagggcctgatttatctgtttctcgtttgattgtggtaaatatagaagaaaaagaatatcattttattgttcgtgaacatccgattgtagggaaatttatatcgctatttgaaaatgggaaagaatacggtttaatagataaacaaatcgctaataaagataaatttattacatcggagcttactaagttagattattttaatatagatgttttatatcttacacctgggtggatatggattggtatggatcaatttggtttacatgctcgtgaggctacttataacgaagtagatgttattatgaagttgaaagaggatttatattatatagatatatacgaagaaataaaaatgtagtaaatatttattcaggttaggggggaagttcccatagccttttttttgtttaataataaaatgcaaaattatattattttaatgaaaggtaaatatgataagaagtgagatgaaaagaggatttgaaaatacattaagagaattgtaataattatatgagtcgtatatgtaaataacaatagaaagaagatgataatatgagtaaagaagagcttgtgaaaaaacagtttggcagcaatgcagataaatatataaatagtaaaatacatgctaaaggactggatttacaatatgtagttcaacaagttgagtctcgtcataataatcgtcttcttgatgttgctactggtggcgggcatgtggcaaatatgttagcacctatgtttgaagaagtagttgcacttgatttaacagaacagatgttagaaaaagcaaaagtttttataaagcagaatggtcatgaaaatgtatcttttgtagcaggaaatgcagagaatttaccatttgcagaccatttttttgatacaattacatgccggattgcagcccatcattttacgagtccggctcaatttatttatgaagtaaatcgtacgttggagaataatggattattcatcttaatagataatgtttcgccagaaaataatgaatatgatacattttataattttatagaaaaaaagcgtgacccaagtcatgaacgagctctaaaaaagacagaatggcttactttattagaaaaaaacggtttgcaaatgcagtcatgtcttacttttgataagaagtttgattttgactggtggtgtaatatgatggatgtccctttacaaaagcgtgaaaaattaacagaatgtatgatgaaagcaccaaacgaaatgaagggatattttaatattcaatttaaaaataataaagtagaatcgttctatactgaaatggctatgtttatatgtaaaaaaagtacaacgttaaaaagataaagataaatgtgttgcagtctttctgaagtacgatatacttagtacagagaaactgagaattgaggaatagttataatgattcgtgtacgcattgaaggtactgaggaagaaatgcttgaatttatggggaaaatgccagacattcctggatttgaaaagacacatatgagagagccgagaaaaggaaataacccgaaatacgattcaagtaaaaatgtacttgcatatttgtcttataaaaagattgaagtcgccaataaataggcggctcttttagtttgcgctgtttcaccgccttgtctttttcacataataataatagtagattatgctcaagaggggtgagaatagttaataagaaaattatcttttttggagactttggtattgatgacgccgtagcgttaatttatgcaaataaaacatgtaaattagatattttaggtattgttgctgagtatgggaatgtatcacgagatatcgttacggaaaatgtttattttttagaaaggtattatgctacacaagtgaaaattattgaaggtgcgagtagaccgatgacagctgaagagcctttgtttttccctgaaatccacggggatcacggtttaggtcctattattccacctgagatgagaatttgtaaacgagaaaatttttgtgaattaatcaaattaatcgaaccttgtccagaagatattataattgtggcgacagggagactaacgacgcttgctacgttatttttattgtatccaaatataatggatcgtatttgttcgtattatataatgggcggcgctttcctatttccaggtaatgttacaccagtatctgaagcgaatttttatggtgatccaattgcagtaaatattgttatgaaatatgcgaaaaacgctagcatatacccgttaaatgtaacacagggcgcgcttataacacctgaaatggccaatataatagataaacaaggaactggacaggcgaaactcattaaaccaatgattgatttttattatgagaacttttataaaaaagaatatccgggtattggtgggagtcctatacacgatttattaccgtttatctcgtttataaatgacagtattttcgaatataaaaaatcggcagtgtggattagtacgacaaatgatgtgactaggggccaaagtgtagcagactttagaaaaatagctgagccaacaaggtttgatgatcggccgattcaaagaattgctgttggttttaactatgcagcttttaaagaagagtttatgcgaacaatattgaagccagattgtccttaatgtgtgtaataacaagtcggataaatcgttagttcaaaaaaaggtttaatctgtgtgtattattctcaaaaatcttaaagttgaacaacatgaataacttatgaaaaatgtcacataactaatggtaagcaattgtttctaattatattttgattggtgaaatgtaaaggaggttattatatgatttggtctttaatcgtcggtggtatattagggtggcttgcgagcttaattactggaaaggacgtacctggtggtgtaataggtaatattattgctggtattatcggttcttgggttggttcgaaattacttggtagttttggtccagtcattggcggatatgcaattattccagctttaatcggtgcgatcattttaattttcatcgtaagcttcttattacgagcaatgcgaaaatgaatgtaaggactgtttacatttgtaagcagtcctttttatatgttatgctagtattatacaatcaggaggtgtcagcattgaaaacattcacagtaaatttccatcaagaagataatgctaaagcgacaacagtacataaattaagtgaagaggactttaacaaagcaacagaaaaaggcactcgtcatctatttgatttagatacaaacgttggattcttcgtattctttgacgcagaagatgcagaaggaaacgatcaatacttaatgttacaatacgaaggtgatcatgaagagccaactgcgtgctacggatttgatttaaaactatactatcaatttttagcactgtacttaaacgatcttgagttccaaggtgaaacagatgaggaagaggaagaatacggtccaattcatcatttagcgcatttactttatcatattgttgaagatggtaaatcaatcgaagtgtaatatacatatttgaagctgccctttttgggcagcttttttatatgacattggaatggtgtactgtgagctaaataaagtgaaactttaatcagtggggggtgttcatccccactgattatcagccctcaccaatcgggcttttacggacagtagggcccccacctaacttctttgtttccgctgaattttgaggtggggatcttactgcccggcaaatagcgggataaattaataatagaaatttatttattactttcatgttagcatcgtaaaacacctgttataatgattgtaattaaattcatggaggctaattctatgcttgtagatgtaaaagcttttattaaagctgcaggtttaacatgtatttcattattaagtggagataacacgtttgcttataattttgaaactgtaaaaaatactatcgctacattttttaagaagctaagatttaccgtataattttatttcaatcagtaggaaaagagtaatcacttcctactgttttttttctgtttcaaggagctgttgtgagagcatgttttaagttatagatagaggatattatcattgagaagagaaggtttaaataaggagatgaaaatggtttcgtttatcaagaggtagttacttcggatataacagacttggttactttttagaaacagcttttgtaatatgttttgtacaagcttttggagagagtgaagcactgactttttggaacaaacataatttgaaaagtaatgtaatgggttggttaacgaaatgaataagatgcaatagggggtaaaaatgatgaaaatatatttaaaaatagttatgttatttttggtgtttacatgtatgtttgcgctagtcgcatgtaaagggacagacgaaaaaaaggaaacaaatccaacctcggaaaataataaaaatgaacaaagtaatttttcagaagaacagaaaaatcctgaagcaaaaccaagcaatgaaaaaacaacaaaaccatcgcctgacccagattcgaaaaatagaacacttaatcaaaaatcaattaaccacgttaaagatttgtttgaactcgcaaaagaaggaaaagtacctaatgtaccatttggagcccatacaggggatattgaagaaattgaaaaagcgtgggggaaagcaaataaaaccgaatatgcagggaacggaatgtacgcaacttttacaaataaaaatattgttttcggatttaataaagggtcacaagtttttgatgtacgctcatatcatgcagaactaaaattgattacattacaagaaattgaaaaagcattaggaaaaccatcttcagttaaagagaatggtgaagataaaatatatgtatacaaagtaaataaccagtatgagctgaaatttgtcattccaaaatcgactggtaaggtagatcatatttctgtattttcaccagaggatagtattaataaaatggcaggataagaaattaagtgatttcaaaaacacctcactttccttaagtgaggtgtttttagttgtaaataaggaacgtctcctgccatataaaacatactttcatacgcgaaatacttcacttttgttttttaatattcatccaataagaaatattgatctactgaaaaagtagtaacctataaattatgtgtaggctggttcatgatttttttacgttctaaattttgaacaaacagtgcttgaacaatacctccaattaataagaaactagcacaaatataaaacagcatacttccatttaacttacttaataaaactgcacccataactggtccgcacgttcgagatatatcccagtgtataccgtaaattgaaaaatataaaccacgtttattgtgaggtgcaatttctgaaacgaatcgtaataagtggtttagagcaatactttctccaatgactaaaaagagtaaggtgaagaataacgacaatatcgtcgttgaagaactaaagccaactgcagctattgtatagcaggcgtaagaaataaggatgattttcgccatagaaaatcgttcagaccattttacgaggaagatttgtagtatgatttccaaaatggctttgcatgttgaaataaatgcgagtatgaataagagattaggaaatacatgttctgcaaaaatacgataattcgtctcagtttgtgcataaaaaaagctaataggaagtgtagaaaccataagaccgaatatggcataatgtttaaaaataaattgctttggtgaacttgcctcaactgtttgtttcgacttactcataggtggaacggtttctgggagctgggtccaaacaacaacggcatatatcgtaagggttacactttgcacgataaataaatattctgggtgagtattataaaaacatgcaccgattaaagggccgattacggatccaattgctcccatcgtttgtaggagagcaaaaatttctgcttgctgctcttgttttgttaaatcagcaatttgtgcacgctgagctggaatgtataaggaacggccaataccattaatgacatataacagtgcaaatataaaaacagattgagcgaaaacgaaactgccgattgcaacaccttgtagtaataatccgagtaacataatcttttttcggccatatttatcagtaattcctccagcaataagtgtaaataaaatgtctgaaagtggctgtaatccgaaaattagcatagttattattacattgccgtttaacattttattgacgtaaataatcataatgagagctaacatagattcagtcgttcgggttaataattcaccacacaatctaataaaaataggtttattgtaacgaagtaagagataattcaatattaattcctcctttctatattgaaatgataagatgaaaggagagttggaaaaagggtagagactatagggaggatttttcaccttttagggggagtatgatgtttattttagatcaatacattgaactatggattgcttatggaaaaggaaaaaaagagggagaacgattggaagtaacagtgcaaaatatatctggtacattattttgtacagagcgcaatagtaaattaattataaaaaaattagatgagttaaattggatcaagtggtttccaggtcgcggcagaggaaatcggtctaagttaatatttcaaaagcacccgatgtctttaattttagatagaggaaaagaaataatgaaaaaaggggatgtgaaaagcggaagtatatttgtggaacgctatagctcacattttccatcagtaaagggagaatatcattcctgggtggattcaatatttggtcataaggttgaaatgacatctgaagggagaagagatgtactccggttgcaagtacaaatgaatttagatatcacattagatcctgtatacgctacaatgcgctcagaatgccatatggtaaaacatatattcgacacactcgtgtatgtagacggtaatacaaacattatagagccaagacttgcatttcactgggaatataatgacgctgaaaaaatatggacgttttacttacgaaaaggagttcactttcataatggaaaacaacttactgcacatgatgttatatactcgttgaatagatttataaagctggaaaataatgcacacgcatggatgttacaacacgttgaaagtatccgttcagtggatgactacgttttcgaaattcaattacatacagaaaatcgaatgtttttacatatgctaagtgcagaacagtgttctatcgtgaatgaagatgaagcaggagggctaattggaaccgggccttttcaattatataaaagtaatgaaaatctgttcattttagaaggacatcctttatattttcgtgaaagaccttttttagatcgtgttgagttgtggaatgtagaacaaggtgtaggtacatacgatgttttagtaaaggcgcagtataaagataaagaaaaacataataaagaattgtctcggcttgagtcgaacgtgacatatataacatgtaatcttacgaaagaaggaccaatgcaagatgagttatttcggaaagcgttatataacatcattcatggttatacaatcgttcaagaactcggcagagaacgtggagaagtggcaaaaaaactaatattagcaggtgaaagcattgtagagattgaggaagatgtagaaagtttaattaaaaggagtacttatcataatgaagtgctacaactctacacatttacaggacgagatcatgttgaagatgcacagtggatacaaaaagagtgtgcgaaatatgggattcgtgtagaaaataattttcttgatatagaagagctattggaagtaagtacgatacaaaaggccgatatgatgcatgatagtgccacaatcagtgaacgaatagaagatagtctattatatatgtttcttacaaaaaatagttttattcatggacaaagcagcatggactttcatgaaaagttgtctccttattttagacaagaagaattagagaaaagagttgcactgttacgcgatatcgaggatactttgttacgtcaaattcatattattcctttatatcgtaataaacaagaggtaagtacacatgaaaaagttcaaaatataatgattaattcacaaggttggattgatttttataatatttggtttaagtcttgatatataagggcttttgcacattttcataaggtgtgtaagagccttttttgtatgtaggaataggtttgttttacacattgttacgctacttgtgataaaagtctatttacagcgtaacagtgttatgttacattgttatcaggaaggagtgttatagagttgagtacagatttaatttcaaaaaaagatttattagaactaactggtatttcatacggacagttatataggtggaaaagaaaaaatttaattccggaagattggtttgtacgaaaatcaacgtttacaggtcaagagacattttttccgaaagaaaagatattagagcgtatcgataaaatccaaacgatgaaagaggatttatcacttgatgaactagcgaacatgttttcgccgagtgtgagagaaattcttttaacaaaggaagacattttatgcaaggggattgcatcagaaccagttttacaatttttcatagaacaaacgaataaaagagcagagtttcaatttgtagatattctttatgtgtacatgttagaagaattactgcaatcaggagagattagtttagaagaaggaaaaatggtcttgcaagttttacgtgaaaattatgaagcaattaaacataaaacttgtgacttaattattgtccgaaagttagggatttctacatgtttattagtctcaaacgtggacgatttaatttttgaaaaaggcaccaaaatcgttttacgcgaagcgattatgaaatataccgaagcattaaaaactaaattgttgtagtggaggagaaagtatgcgtacagataatttgattataaatggttacggttcatcgaatggtggcgagtttcataaagtgcaattaaacggaaaaggaactgtgaatggaaatgttgaatgtgagcaatttgaatgtaacggttacggtgcagttactggcgatttgaaaagtagcagtgcacgaattagcggatctggtaaagttgatggcacagttcaagctgaaacgatgcgaattgatggaaaagcaacaattacgcaaaatgtaaaagcaaacagtttgaaaattgcaggaaaaggtacgataggtggaaatgtcactggtgaagaatttaaagtcaatggtcaagctacaattgacggtaattgtgaagtggatactttttcttcagaaggacaatttacaatcggtggtttattaagcgcagatgaaattaatataaatattcacggtacatgtcgagcgaaagaaattggtggtcaaacgattaaagtaagacatagatcaggtacatttagtagactatttaaaacagtgtttggcttgcagttagaagctgaactattagaaggtgacaatatcgatattgattatgctcacataagaacggtaagaggaaacaatgttacagtaggagcaaactgtgagattgaactgattgaatataccggtgttcttactgttgataaaaatgcaaatgtaaaagaaattaagcaggtttaacggaagggagaaatcagtatggaacatccacatagtctcacagtaaatggttctggtaattcagcaggcggagattataataaagtgaagattcgcggtgaaggaacaattacgaatgatatgagttgcaatgagtttaaaacgtacggaacgagtgatgtacgcggtaatgtgaaagtgaaaaactatgtcgtgtatggagataacgaagtacaaggaaatgtagatgcggaatatgtaaaagtatatggtaatacacaaattcatggtgatgctcatattgaaaaaacaaaagttagaggtatgatagatattgaaggaaagttttcaggtgatttcgtagatgtaaaaggtgctttaaatgtaaagggagatattgaagtagaagatttatcattaactggtggtcttgaaagtgatggattacttaatgctgaaaatattcaaatctcacttcgttatgaaggcagtaaggtaagagaaattggtggtaaaaaaattaccgttcgtaaaaaagcgagatttattccttttactagtcatgctggaaacctccaaacttcaattgttgaaggagatgatatctatttagaacatacgattgctgaagttgtaagaggcaacaacgtcacaattggtcctggatgtgaaattagtgttgtagaatatcatactagttttaatcaaaaaggtaatgcagtcgtaaaagaacataaacaaatataagtagtatgagggagagcaagagatatggttgagaagaataataagctcggctttgttgtggcgggcttattgctaggtattttaatggcatcgatggataataccattgtcgtaacggcgatgggaacaatcgttggtgacttaggaggcctcgaaaactttgtatgggtcgtttctgcctatatggtcgcagaaatggcaggcatgcctattttcggtaagctatcagatatgtatggtagaaagagattctttattttcggtttaattgtctttatgattggttcggcactttgtggtactgctgaaaatattacacagttaggtatttatcgtgccattcaaggtattggcggcggggcattagtgccgatcgcgtttactatcgtttttgatatttttccacctgaaaaacgcgggaaaatgggtggtttattcggagctgtatttggattatctagtattttcgggccattacttggcgcatatattaccgattatattagctggcactgggtattttatattaacttaccacttggcattttagcacttatttttattacattcttttataaagaatcacgcgttcatagaaagcaaaagattgattggtttggcgcaattactttagttggtgcagtagtttctttaatgtttgcgcttgaactaggcggacaaaaatatgattgggattctagctttattttaagtttatttggtggattcgctattttaatcatcgcattcatttttattgaacgaaaagtagaagaaccaattatttcatttgagatgtttaagcagcgcttattcggaatgagtacaattattgcattatgttacggtgctgcatttatgtcagcaactgtttacattccgttattcattcaaggtgtatacggcgggactgcaacaaactcaggattattacttttacctatgatgctaggatcagtcgtaacagcgcagttaggtggatttttaacgactaagctgagctaccgaaacattatgattatttctgctgttattatgttaatcggattattcttattaagtacattaacgccagaaacaagtcgtgcattattaacggtttatatgattattatcggatttggagtaggtttctcattctctgtactaagtatggcttcaattcataacttcggtatggaacagcgtggatctgcgacttcaacgagtaacttcattcgttcattaggaatgacactaggtattacaatcttcggaatgatccaaagaacaggtttccaagatcaattagaagaagcatttaaagggatgagcgggggaatgaatacaaaattaggggattcaagagccattttatcagaatcggcaagatctcaaatccctccgcaaatattagataagattattgacgctctttctagttcaattgttcaaacattcatgtgggcattggtaccagctggattagcattcatattcattttctttatgggaaatgagcgtatggtaattaagaaagaacaaatgaataaaaagagtgaaacatcaaaagcgtaatgaaaaatctcctttccaattggaaaggagatttttcgtatgtacggtgttagattagccttcgataatttcgtattcttcgtctgcaagtaataaaatttgcgttttcttgcctttgttttgaacttcgattacatcgtatgcgcctaagtctcttactttgctttgagaagcgttaaccataacttcaatagaatcaattaagatatcttcttcaatatatgattcaggcaatgccatatcttcagtatctaatacacacgcatatagattttgtaaattttcagtagttgggttttgttcctcaacatcaatgatattttttactgcatccatattttcttcttttgcttggtacactttaattttagccataattttaatctcctttataacgtaatcgtagaggctacacctcattataacgttttttttatgaaagatgaaattgttatatgtatttatagtaaaaattatgtgtccttactcaaaattggtgtgatttccatataaatgtacgagtaggtaacgataatgttacgttaaagttatattgtccaagcttttcttattttcttcctatatatatgtagtagcaattctatatagagaagggatggagtgtaagtgggttgtgaaccgagagtttctagagattttgttcaagtacctgaactggtaggttttcgattacttttatcacatccagctggagaccctttaaactacggattattatttattaattttcctgatacgatttttatttttatattggcatcaagcggataccttgccatttcgaactgtttaaaaatagagggcggaactggtgatgccgaaatagaagagatgaaaaaatgatagaggatgacgataatacgtacaagtcagttgttaaattgactaaagtatataagaacggtgagacggaatcttttatttataaaaatgagttataatacatgtatttaaatgaaccctcaaactattgttgagggttgttacataattaattatgttgatcctttaagccatttgttaacgagtaagaaatatatttattgttgacttattttataggttgatcatttcatagttagtagatgttataatcattttatgtttactgatattttataaatattcgaagtttcaatttaatagtcaattgcttttatgatgaacaggtgggtgtgtatatgaatacgaattatggagcgctcatgaaaatgttaagagtggttgattctaaagaaggcgggaatgtaaatgatatatgaagcgaatatacatacaagaaaaaaactagtttctatgtttgaggatttcaataacgttgttttactttcttatttacaagggcatatgggtactgcttgggtaaatgatcttgaaaatccaacagtagcacaagttatggtaggaatttttacattttacgctggagacccaaatacgaaagaaacagaagagttattacgtaatattccagaaagaattttagttatcgtaaatagtgaagagtggaaacaacgcttagaaacattccatgaaagaaaaatagataagtttttacgttataaattcaaacgaaatccagaagtttttaatcgttcaaaattacaatcttttatatcagcacttccaaaagaatatgagttaagaagaatagatgagcatatcgcaaatagccccaaattacataagatatctgaagattttacaagtcaatttcattcgatagaagattatataaaccgtggtataggttatagcattttatataatggagaagttgtatgcggtgcatcctcctatagtatttataatgatgggattgaaattgaagttgcgactgatcacaatcatagaagagagggcttggcaactgtagttagtgcagctattatattggattgcttagaaaatggaaagtatccaaactgggacgcagcgaatactacatctgctaaactagcagaaaagttaggatatgaatttgataaggcatatgatacttattttgtagataatagatgagtgaaggagttacatactaaaaaatacatgcgccctagtacgtaagtctagggcgcatgtattagttggtaaatatcttcataacaattttatcacattttatcttttgaatgtttggaattaaagatatttatgtgactttttgaaaaaataaaagagcagttagcaaaagctaactgctcttctccaagggggaatggagaaatacaatcatgttacctatagtattgacagaacattgagttttaatcagccatttataaaaggagagataaaatatctttgattaatctttagctcccattaggagtactgatagaaaaacgattgagaatatatttttttattacatttacaatttgaagagtagaacgtgtttatcgtaattctccaaacaccaattatatttttttagaatgattggatggactgcttctttcgtagtatcgacttcagtatatccatatttcttataaaagttttctaattcctcaaaaggaagacaatatacattttgtatttgtgatttttttgcagtttctactaaaaatgaaacaagctcaccagctaattgtagccctctaaattgaggcagaataaaaattccgcccatttctaaagtatcttcatctatttggactaatcggccaacgcctgcatactcgttgttatatgtaataattgcaactttatctctctttaaatcactccgtacaaatcctattgagtcatattgattattaacccattctaaatcgttagatgtagccaattgaatactcatatacatcctccttggaaatactagcgctctcttcattatatagaacataagatactatatcaaaagaaccttgagatagcacatttgtttaagttattagttaaaagtgtgggattgctggcattgaaatgatggcttcaccaaacataggataataatcttgtgaatttagtgttacatagtcaaaataaaaattagtttatgtgttcggtaacgcaagattgtttaagtgtagagaaaatcatagggttattttaattagtagctactgtattcattgaagctattaaggaaacgtggtaatcgccagccctagtgatacaaatcatattaggatttagtaaaaaaaattcttcctgaaaaagagggggattaaagataagagcacttcgaaaagtgcccttcagtaacgactacttattctaaaaagaaaggatgcaatatatcatatgaagtttagtgtatttaagtatgggtcttttatataaatgtgaaataaaagagggttgtcttcttattagaaggcagctttttgttattacaaaaaagaattagaaataaaatataaattcagttacttgtccaaacaatttttttgaaaatacataaaatgctagtagttagccaatatttttatattgttaattttttagactaaaaggggtgattttatgtgtgattgtgaagtttgtagaagaaagaaaaaacgtgatccattaaatcggggttctgaaccaaaaaaacaggattccgaatcagtaaattcttattcatttagtaaaaatgcaaattttttagaagaagctatacaaacagatgaaatcgatcaagtttctgaggaatatattgaaatagtagattcagcagatgtacaagttactactacagatacaaaagctgcactatctatccaagccgcgttacaagcagctattgtggttgtagtaagtatttctatagcagatagtgaaaaggcagataaaataacacaagaattgtttcaaaaatcatctattaaacaaattaatagacaaaaaacatttattaaaaattccagaaacgtaaccgtaacaactactgatacagatattgcagtgaatattcaaattcttcttcaaattttattagcgttattagttaaactaaacattttataaagtgtctatcctatttatatttagctataagggttcactctaagtaaatattttttgttgtaatatgtggtacaagcttggactttctcattatgactgaattaatattcaaaattgatgggaaattaagtgtggaaaactacacaataacaaaggtgaacctattatttaacagtgaataaaacttatatatgtgaagtaaaggaaagctgtcttcgtattagaagacagctttttgattttattagtaaaaagccgtgaaaataaaagattaagttacttgtccaagcattttttatttaaatacatataatgctggtagttaatctaaatttttatagaaaactgataggagtgaatattgtaaatggatgatttaaataaattttcttcctttaagtttgataaggatcaaaagaatataattatagaccttttactctcagatatttttaataggcatgggataaatgaagaaaaactaaaaaatttatcaccagaaaaaaagcagcaaattaaaagtattgtttctgaaatacaatcacaagttaataattatttagattgaaagggggtgaatgtatgaaaaaaacatgtcattcagaggaaaataaaaggtggagtgcattagactcctcaaatcctcatccatcttttaaaaatgctactgtttcagaagctgcagcacaagaaagtaaaacttaccaaatttctgaagaatctattacaattgtagattcagcagatgtagaagttacgactacagatacaaaagctgcgttatctattcaagctgcattacaagcagctatcgtggttataataagtatttctatagcagatagtgaaaaagctgaccgtgtagcacaagaattgtttcaaaaatcatctattaaacaaattaataaacaagaaactgttattagaaattctagaaatgttacagttacgactacagatacagacatagcagtaaatgttcaaattcttctccaaattttattagctttactagtaaaattaaatattttataaaatgtttaaccttctttagatatagtgcatcttacaggtaaatattcactgttttaattatagtacaggctataaatatttatcataactggattaatattcaacatcaccaaagtatgaatgtaaacaaacaatgtgatggaaaataaagtttggttattttatgaaaattgaaaagccatttcctttattggatttggcttttcaattttaaacagtatgaatttgaaaagataatattaagctaaagaagtaaaatatactgatacaaaatacttataaaattactcgtgttatagaaaaataataagaaaaaggtgtttaaaatagaatcattttcattaatagttcaagttttgaagaatagtgcatacaatataaagtgttttcctttcttcatttaagttttacgtatataatttaaaagtactatttttattttattattttatatttataacagaatagaggtttaaaaatgagtgttaaaatcattacggatagtgcggcggatttaccagtagaattgctgcaagcatatgatattgatttaattccactccgtgtatatgatgaagcagaaacagagtatttagatggagtaacattagagtcagttacattattacaaaaaatgagagaaggcgctgtttatagaacatcattgccttcacttgaaactttccaagaaaaatttgtttcttatgcaaaagaaggtaatccttgtatatatttagctttttcatctgaactgtctggtacatatcaatcatcagttgtcattaaagaggaagtaaaagaaacatatgcagatttagatttagaaattattgatacaaaatgtgcttcgcttggtcaaggtcttgtcgttttagaagctgctaaaatggcaaaagacggcgcaccaaaagaagatattttaaaccgtgtcgcttttctaatgaaccatatggagcacatcttcactgtagctgacttacagtaccttgttagaggtggacgtttaagtaaagtagctggttttatcggtggtttactaaacattaagcctatcttaaacgtggaagaaggaaaacttgtaccacttgaaaaggtaagagggaaaaagaaagtattaagccgaattgttgatattatggaagagcgtggtaaagaccttaaaggtcaaacaatcggtatcactcatggtgatgacttagaaacagcggaagcattaaaatcattaattacggaaagattcggttgtgaagtatttatcgtaaatacaattggtgcagcaatcggagcacatacaggacctggcgttataacgttatttttcttaaatgaagtagagtaaaggattgatcatttgatcaatccttttttctttaatctgtgattaccggtcgatatggtattggtgaagataaaatctttgaagttttcctatatgaattgctctcttgtagagggagtattttttatatgtggaatgatacttaatggtagaagaaaagagtataaataagaatgtatttgtaggaatttaaatatttgaagatatcaaaattttgccatttcatatataattgtgtggggagaaatatctgtaactatttgtaaaaataggaggcgactataaaaatgcaagaaattgctagatgggatttaaatcgcttgtatttgaatgaggatattctatttccaattttggagttgaaagagaaatattttgtaacaaaagatgtagaggttctttcaaagctaatacaagctattgagaaaacagaatactatttgtactgtagatcagttgaagaaagtgtaccatctgaccttactaaattgaccgtgaaagtgaaggaactaaaaaatgaattacagcaagtaataaaacataatgaagtggaaacttcagataatactaagttaataaaagatgagcttaatgcttgggaaaatatgtacatacaattacgggataggatagaaatagagcacaataataaacaattatcctttggacaagcaaatactattgcaatgaatagtgataatgaaaaggaaagattagaagtattcgagttacttacaagtactttacataaggaaaaagaaatctttgctactgtattaaatcaaatagggagattgcgtaatgcaaagagtaatgaaatagaagatagagagattttaacacaatcttttcatgcgaatggcatttcagaaactgtattattccaaatgtggaatgcgacagaagaaaaccttgataaattagtaagtgctttaaacgtgtataagaaaggaaaagcttcaattacatggcatgaacttatgacggtaaaggaaagtaatgagatcatgattcctttttcagtagcaatacaaaacgtttatgatgcatgtaagaatattgatgaagaattagcagaatttgcacgtaatgcgatagaaagtggttgggtagatgctgaaccgagagagaataaaccaccaggtgggttttgtgctccatttttcagtgagaaagaatcgcgaatttccattcgttatgatgggagtatagatagtgtaagagtgctcgctcatgaattaggacatgcttggcatttttataatatgagttttgaacaatctacatcttttttagatgattatttgccaatgagtacggctgaatcagcatctattttctttgaaacggtactcttaaattatctaattgaaacaacggatagtaaagatatgaaaaagtcattacttagctggaaaataagaaatagttttaattatgtaatggcaatacgagcatcgtatcagtttgaaaaaacattttatgaaaaatgtaaagagggtcctttaagtgctgatgaaattgagaaattatctataattgcacaaaaagaagcttatggaaaagctttaagtgaataccagccgtttgtatggatgaaatatattcaattttatatagcagatgttcctttttacaattatccatacacatttggatatttagtaagttttagcttattagaaatagctcaagaaggtaaaagtacttttcattcgaaatataaagagttcttacgagaaacaggaaaggctccagtagaggagcttatgaaaaaacattttgaaatagatataagaaattatgaattttggaataaagcttttattcaaatttctaaagacattgatgaatatttgcagcttatgtaaggggagagtacagtggatcagcagtttataaaaggtatacctttttcaactttagaatatgcaaaagctataagtttattaaaaggttggctacatgaacaacaagagaaaccaaggtttgtagtaactgcaaatcctgaaattgttatgtctgcaaaggaaaatacggaaaaatcaaaggagtttaaaaagatgttactatctgcggatttaataacagcggatgggattggtgtcataattggctcgaaaatattaaaaggaactttgaaagaacgtgttactggggcggatttaactcacgatttaataaaatattgtaacgacaatgaatatcgtgtctttctttttggagctgcgccagaaagtaataaaaaggcattagaaaaattaaatgagcagttcccaggagcacaatttaaaggacagcatggatttgtaaatggtgaagaaatagaagaaataaaaatgaaaattaagcagttcaagccgcatttactactcgtaggactaggttcaccaaaacaagaagagttcatctatgaaaacatacaaacattaaacgttccgctatctattggtatcggaggcatgattgatataatatctggtactgtaaaaagagcaccaaaaataatgagggatactggaactgaatggctgtataggttactctcacagccgaaaagattaaagagacaacttgtacttccgaaatttttattatcggttatgtctgagcggattaaagggattaattaataaaggggactacatacataaacagaatcggcattatcggagcaatgcaaattgaaatagatttacttttaaaaaagctagtaatacaagaagaacagacaattgcgggaatgccattttatattggagaattcatgggaacagaagtaattattacacgttctggtgtagggaaagtaaatgctgctgcatgtgtgcaaacattaattcataaatttaatgtagactctatcatcaatacgggcgttgctggtggattacatccaggtgtaaaagttggcgatttagttatttcaactaacgttacccatcatgattttacatatataaaagaaaataattgttccatttacattgctagtaatggtttgaaagaatatttacgagcaatcgtaacttattatgctttagacaagtgggtgacagaaacgtttagtattgaacaaatacaatcgctaaataaaggtgacttagttaaaagtattatgaaccaatatgatataaaagaggcagcggtagttggtgaccggctatgtgatataaatgcagcgaaagacaacggtttacttgcaattgggtgcaattttgattttgcgcaagaagatgaacttgctcaggctgatgtagtaatagatgatttaatggagttgaaggggatattacctgctgtacagaggtaaataaagtgtgtgcgttttttgccaagtcctatatgtcttagtttatggagggaatatgattaaaaataattttaaaattagtaatattcctgcggttttatggggagataagagtgataaaatttttattgcagtacatggaaatatgtcaaataaggaagatacaattattcaaatattagctgaagaagccaaacaaaaaggttatcaagtattaagctttgatttacctgagcatggagaaagaaaagatgataatacgccttgcaaagtacagatttgtgttagtgaattatctataattatgaattatgcaaaagaacattggaaagaaataaacgtgtttgcatgtagtatgggagcgtattttagccttttagcttatcaaaatgatgtggtagaaaaggcattatttttatcaccagtagttaatatggaacgaattatcgaaaatatgatgaaatggtttaatgtaacaccagagcttttgcaaaaagaaatgactatagagacacctattggtcaaaagttatattgggattatttatgctatgtaaaagaacatccgattaatacatggaatatagatacatatattttgtacggagccaaggatgaactgtgtgaacttgaaactattaactattttacagaaaaacatcgttgtgaattagaagttatggagacgggtgaacattactttcataccgaagaacagttaaagatatttgaacagtggttacacaagcatatcgattaacaaattacaatttattttgaacctgttagagaagaatgagaaatatataaacttatagtatatttgagagaatttataaatggtgaatgtatacacttaaacaaacacatgctttaattcgataagaattaaacaactttaaagagccttatcacacactagattgtagcaaggctcttatattttcataataaaattaatcaactgtattatcgatttacatatgaagtgaagaatacgcacgctataaattacataaagtaacaaccataaaaatgctcagaataaaagattctcgagcatttttatgtattttcatacttagggggaatggacttgaaagatatacatattcaacaaatagaaaatttaatggaatatgaattcagtcatctcgttcaagacagtgaagaagaaggttttaatttccttataaggctaataaatgaatataaaaacaaaataaatgtattcaataaaactggagaatgtttatatggtgttttccaaggtgatatgttaattggagttggaggtttaaatgaggatccgtacacaaaagacaataagattgggcggttaaggagattttatatttcaagggattatcggcgtatagggttagggaacttattattaaaccaactattatgtcatgcggaaaaatattttgaagtgattgttttacatactgacacgaagcaaggggatgtgttttatactgcgaatggatttgtaaaagggggattatataagggatcgagtcactacaaactattatagagattgctatccaaataatagctacgaacaggttttttgttggtaaatcgatatatcttaaaaatcgctgatatatgaagttgcgatccttatattaaaagacaacttttataatttcatttactaaattgttattataaaaaagagcaccttagcttttaaaatttagcttataaggtgactccttttcagtcaattacgttttaacgttcatttgtttcaataataatcctggtttaccttttacataataaaaatgcgggttattttcatcatcataaagcataatataaggcttttcatttagtgggagcagtataagtacttcgtctattgtagtgtgtaaccattgattagtaatagaaaccggcttagataatgggatttttatcatatagccatcttttggaacgacatttaagtttttaaatggaccagtaattgctttagcgtattgaactgcttctttttggactattggatctaaagattgtttttgaatgaccatttctttttgacaatcaaatacttcaatttgttgatttgtatttgcgaacgcatttgttgataatagaaatagaagaagagaaatgaccccgattttttttatcatagtacaacacctcaccattactatcccctcaaaagctttaaatatttttctgtcacattcatgtaacaaagatgttgtatgatacaattggtttttgtttaaaagcaatggaggaaaaaatatgaaagttttaattgcagatgacgaacaagatatgttaaggattttaaaagcttattttgaaaaagaaggctttgaagtattattagcgaaagacggagaggaagcacttcaaatattttatgatgaaaaaattgatttagctattttggattggatgatgccgaaacatagtggtattactgtctgtcaggaaataaaaaagaattcaagcgtaaaagtattaatgcttacggcgaaaagtgaaagtgaagatgaattagcagcgcttcaaagtggggcagatgagtacgtaaaaaaaccatttcatccaggagtactaattacacgagcgaaaaaacttattcagcatgatgatattattcaagtacaagatgtaaagataaatttcgccaaaaataaagtatataaaaatgatatagagttagaaattacaaaaacagagctcgaattaataaaatgctttttaaatcataaaggaactattttaactcgtaaaaaattgttagacattgtatggggatttgactattttggagaagagagaacggttgatacacatgtaagaaggctgcgtaaaaaaattggagaaaatattattaagacgcatcgtgggctgggttatagtttggaggaacaaagtgaataaacttgggaaaaagctatttctcagcatttctttaaccgttattcttatatttacaatttctttattattaattaactttctcttgccgaaatataatatttataaaacacgtgaaaacttaaatgaatttacaactcaaatacaaaatgcgccagtcaatgatttagaagatattattcatacaattgaaagtgaaaataatgttacaattgcgtatacgccaattaatcagtcagaagatgctatgaacgacgcgttacgcatgcaacttacgaaaaagaaagtaacgttaaataagctttggattacgaaagacgaagttatgaaagtgaagacggaagggcaatcgaataaactgtacgatcaaggaaaggtaaaagcgagtttttttgctaaatatattgcgaaagatgatacgataattttaattgggacttccattgcgaattcaaatgaaattataaatacgttaaatacattttacttatatatcctatgtttctcgctccttcttattattttacttgtgtggatactttcaaaaataataacgacaccactgaaagagttaagtgatgtggctcaggatatttcacatttgcagtttaaaagaacgaaagtgaaaacgaatgatgaaataggagagttggccaatagtattaatatcatgagtgaaaaactacatgaagcacatcaagacttaactgatcgtaatgaacatttaaaacgatttatgggtgatgtaacgcatgaattaaagacaccgatcgcattagtaaaagcatactctatggggattaaagatggattagatgatgggacttatgtagatacaattattaaacaaacagatcaaatatcaaacttaattgaagaactattacgattttctaaactagaaagagatattttacaaaaagaagaattccccattgaaccactggtccagagtatattagataagcatcagattgaactggattcgaaagaaattaacttgcaagtaaattgtaatacgggcgatacaatcgtttatgcagatttaaataaaatgagaatggtgtttcaaaatttaatttctaatgcgataaaatatacagcaaatcaaaacataataattacattagaagatagaaataaaagtatatatttccaaataaaaaatggcattcctacggataaaattaaggatatcgagaaaatttgggagcctttttacgtactagaatcttctcgtagtaaagaaaaatcaggtacaggattaggtctagcgatagtgaaaagtattttagaaaggcatggttttgaatatggagtttcctctatagatggagaaattcaattttatataaatgtgaaaaaggactaatgaaaatattagtcctttttgcagctttagagattagcgatacaggatgaatcaccataattttcaaaattgatgtattaaatggagaattagcaaatgttctactttcattaaattcacgtgaagttcacaggaaaacgttatatttacatagttatatttgaatttaatgaagtgaggtattcagatttgaaaagaaagaaattagtaattggtagcattttaatggggatgacgttatctttatctgcatgtggttcatcagataatattgtaacgacaaaatcaggaagcatttcagaaagtgattttaacaaaaaattaaaagaaaactacggtaaacagaatttatctgaaatggtagtagaaaaagtattaaatgataaatataaagttacggatgaagaggtaacgaaacaactaaaagaattaaaagacaagatgggcgataattttaatacatatatggaatctaatggtgtgaaaaatgaagatcagttgaaagagaaattaaagcttacttttgcttttgaaaaagctattaaagcaaccgtaacggaaaaagatattaaagatcattataagccaaagcttcaagttagccatattttagtaaaagatgaaaagacagcaaaagaaattaaagaaaaattaaatagtggcgaagatttcgcggcagtggctaaacaatattcagaggatccaggttctaaagaaaaaggtggggaactatctgaatttggacctggtatgatggtgaaagaatttgaggatgctgcgtataagttagaagttggtcaattgagtgaacctgttaaatcttctttcggatatcatattattaagctaacggataaaaaagagcttaaaccgtatgaggaagagaaagagaatattcgtaaagaattagaacagcaacgtatacaagatcctcaattccatcaacaagttactagagaactgcttaaaaatgcagatataaaggtatctgataaagacttgaaagatacctttaaagagttagaaaaataataaatggaatgtaaggcaagcgatagaaatatcggttgtctttttctctatttatcccgctatttgccgggcagtaagaccccacctcaaaattcagcgaaagcaaagaagtggccctgctgatcgtaaacgcccaattggtgagggctgattaaagtttcactttataaagaaggaggaagtgggaaaatactttcatacctgcattaaattttacttaataagaaatctttgagtttctcaacttttatataaaataaaactgaattttcagttattttgttatatagtaaaagagaacgaataaggggagggaacattttgagtaaaaagaaaatggcaattacactgtcagcaatgctatctgcaacaattatacctagctttactatggatgtgcatgcagagaagaaggaagagactaaaagtacaaaaattgaattagaaaatgggatgacaaaaccgatttattctctcgatgaagctattatcgaaaatttatatgtagagacagaagttgatagtgatcgagacggtaagaaagacagagtatcgataaaagttatgcgtccaaagacagatccgaatgtgaaagttcctgttatttatgaaatgagtccatatcgatctggattaaaagatgttcctgtatataatgtagatgaagaattgtatgcgtatgaaggaaaaccgtatggagcggttaatcttggttcgtatgggaactattacgtgccaagaggttatgcagttattctaggcgaaagtatcggtactggaaaatcagatggatgccctacaactggagatgaacaagagatactcgggacaaaatctgttattgattgggtaaacggtcgcgcgaaagcatttacagaacagggtgaggaagttcaggcaaattggtctacaggaaatgtaggtatgactggagtttcctataatggtactttaccaaatgctgttgcgactactggagtcgaaggtttaaaaacaattattccaatcgcagcaattagtagttggtatgattattatcgtgcaaatggtgcagtcattgctccaggcggatatcaaggggaagatacagataatatggcagaagcagtactgacaagggaaaaccctgaagtttgcggacaagttataaaagagttaacggctggacaagaccgaaaaacaggtaattataatgatttttgggataaacgtaactatgtaaaagatgctaaaaatgtaaaagcgagtgtatttgttgttcatggtttaaacgattggaatgttaaaacaaaacagttcgcgcaatggtgggaagcacttggagaaaataatgttccgcgtaaaatgtggctacaccaaggtggtcatggtgggacatcaagtaataactggcagcaaacacaaaataaatggttagattattggttgtacggaattgaaaatggaattatgaatgaaccaatggttgatgtgcaacgagaaaataaaacgtggcaaaagataaaaaattggccagatccagcggctgtaccttcaaaaatccgtatgtatttaagtaataaatcagtcaatttaccattaagtatgggagcggctaataaagttttctcattcttagatgatgcacaaatgaaatcaaaccaattagtagcaaacccagaattagaagtagcaaatcgattagtatatacaatgcctgtactgcaaaaagatacgcgtataagtggtacaccaaagatttcaattacaggaaatattgatcgatctgtatcaaatttaacagcattacttgttgactatggaggagcgaagccggaaatcgtaacgagaggctggatggatccacaaaacttaaagagtatagaaaattcaacagcgattcaaccgggcaaagattatacatttacatgggacatgcagccagatgattatgtatttaaagcggggcatcaaatcggagttgttttaattgcaagtgattatgattatacaattaggccgaaagctggcacgaaacttacagtgaaattaagtgaagtgacattgccgattgtgaaataaatattttttctaaagagcttactaaagtaagctctttaatttgtagtctgaatttttaatttttatatttcaaattggaaggttatgtaatacaatatcattatattctatggaaagtgagtgatatattatgacagttagctctttcgaaatatcattaaaatcagaggtgcaggaagattagttgaattgaaatcttccgtacgtaaaaacggaggagaaaataaatgtttagcttttatagtacactttgtacagaactgtatgattacacaaaaccagtcggttattctttaaatggtgatattgagtattacaaaaaacggttaaaagattgtagaggaagaatcctcgaagccgcagtaggttcaggacgtgtcatcattccgcttctagaggctggttttaaagtggatgggatagattattcacctgaaatgctagattcttgccgtaagcgctgtaaagagagaggcttacatcctaatttatatgaaggaagcttgcaacaattttcacttccgcataaatatgacgcaattatcattcctactggatctttttgtttaattgaaaatcgtgtggattctataaatgcattgaaatgtttttatgaacatcttaatccagatggacgattaatcgtagatattatgcttccgtatgactggaagactggggaaattcatacatcgactttctctttgccgagtggagacggaatcacattagaaaataaatcaattgaaatagattggctgaaccaagttactgtatcatatttgaaatatgaaaagtggagtaaaggacagttagtacaaacagaactacaacgctttgcgctgcgctggtatggaatagaagagtttaaacttcttttagaaagtataggtttctctaatattacgtgctctgctgaatatgattatgaaaaagaaccgtcaaatgcaaatcaaatgattacttttgaagctgtgcgaaaagaatagaactaaaactatgaataaaaaataaggcaatcgatttaaaatcggctgccttattttttattttatgtaatggtttatagagaaagattggagggaaataaatgaaacttatattaatatttggcccacaagcagttggaaaaatgacagtggggcaagaattagcaacattaaccggtttaaaactttttcataaccacatgacaattgatttagtaagtccaatttttgattacagtacgaaagaagcaaaaagactagtaagtttatttcgtaatgaaatatttgaagaagtatctaaaagtgatttatctggaatgatttttacgtatatatgggcatttgacctccaagcggattgggattatatacatcatgtagaaagtatttttgaatcaaaaggtgggacagtgcattttgtagagctggaagcggaattagatgaaagattagaacgaaataaaagcccgaatagattagaacataaaccgaaaaaaagagatattgagtggtctgaaaataatttgaaagaaacgatgaaaaagcatagattaaactctcttcatggtgaaattgaaaaagaagagtatataaaaattaataacacgtatttgagtgcaaaagaagtagcggaaatgattaaagagaagtttcaattgtgaaatttttgaagtctatttcgttttcgttgtccaagcattctcctactaattacatatactatttatgttaaagtcggctactattttatatagggctgttattttcctataaatgctattttagtgaagtgggaggaatcaatttggaaaacgtagaacaagatagaattgaaaatcaagtgtattcaaatcgtgtagtaagatcagaatttgattcgaattgggaaacttgtatatcaaagagtggttatgtaatttatgtagcaacaagtaataatgctgaagtaatagtgcttcttgcagatggttcaagtaaattattaattttcgaaaaaggcggtaaagtagtagttggtggcggtggaacaagtcattacagtaagccgcatattgcaagaaatatttaagatagaacatgttaattaagaagaagctggaaaacggttgtcattcatgtttagggcatgatagacgaaccgttttttatttgtttataaatttagaagaacttcattgattacaaatacatcaggatgagcagcgaaattagaagaaaacttggtgggtaatggtacaaaatattatgtaggtttgcaagaatcttataagcgatataaaaaagcatttcctatttggggaaacactacttctatgttatagtataatagtgtttttagatggtgctattttaatatatttataattttgttatgtattatttttatattaaataagcgtctaaagtattttttgatataaggagtaataattagagaaatgaaaaatatagactttatactagaaagtgatgaggcattaaaaccgtctgaacgattagtactattattattagagaagcatagaatgctatatacgaacgatctattggcattatcaaatttatcatataaaacattaacagattcattaacggcgctagttttaaaatcgtatgtgttaaaggaaacgggtaagggaagaagacagaactgctatagattagtatgataaggcagctgttttagagacttttacatatgttttttcaatcgtaaggtggaagtgtgttttttgttttcaaacgaaaaaattactataagaggggttaagatagtagcgtttcatttttgtaaatgtaattatttcatcattgaaaatacaaaaatgaaataaacagtataaaaaagaaataaaaaaacaatccattttaaaaagggattgtttttttattggaataatattatttgatatgttgaaagcatgaatagcagaatagacattacctgttttattttatgcaaatgaacaaatatgatgaaaactatgtgtatagttttttgcttgctttttcagtaactctaatgaaattatggtcttcattgtttaaaggcagtatttttaacattattgctattcagcattaagcacaaaaaagtaatatatataatattattatgtaaacttaagattttaaaaggaaaatataataattaatagaacatgtagaaggagatgcttaaatattttgaaggatgggagattattatggagcatttacaatcaatagcacaagctgttataagtggtaataaggaaaaagtagtgaagtttataaaggcgagtccaagcattgttaacgaatgtagtgaagatggctggacaccacttcatttagcagcttattttggacagaaagaaatagcgagttttcttttagaaagcggtgcagatatacatagtagagcgaaaaatgaaaatgaaaatacacctttgcaagcggcaattgcgaacaagcaaagtgaacttgtcgctttcttaattgaaaaaggatcagatgtaaatattatgcaaagtggtggctggacaggactccacgaagcagcattattaggaaatgaagaaataattatgttgctccttaaaaatggagctaataagatgattaagaaaaatgatgggaaaacagcgtatgatattgcattagaaaaaggatataatcaccttttacatcatttgaaacaggaagtgaacttatgatgaataaatggagtgttggtatatttttatttaatgaagtagaagtgttagactttgcagggccatttgaagttttttctgtaactgaggtgaatgaagaaaaaacatttactgtttatacagttagcgagaatggggaaatgattacagcaaggaatggattgaaggtacagccagattatagtattgaaaatttaccaccagtggatattttaataattccgggtgggctaggtgctagaaaatatgaaataaaaaatgaaatagtaataaaatggattcgccaacaaatgaaagaagtaaagctgatgacttcagtttgtacaggagcgctattactggcgaaagcaggtttactggaaggtttaaaagcaacaacacattgggctagtattgaaaagtttaaaaatgagtttcaaaatgttgaagttatagaaaatgtaaagtttgtagatgaaggacatattataacatctgccggaatttcagctggaattaatatggcatttcatattgtgaaaaacttgttaggtgtgcatgttgcggaggacacagcgaagcgaatggagtatgatattagtttgccaaattaaaaagcccggattgggctttttatattgaatgaatatagttaagctcttcatcactcaaaatagggcgaacagatgcatttgcattttcttgtgcttgtgttcctgtttttgcaccaggaattacaacacttactgccggatgagagagtacatagcgaagtgcaagttgccctaggatctgatttttatttgagagcagccgaagtttctctacggtttgtaagtcttcttgaaaccaaatttcatttggccaatctttgcgtaaatctccatctggaaaaattgttttatttgtgaattttccagttaaaatgcccatttttaatggaccacgaataacagctcctagatttttctcttgtaagaatggtaatatatctttttctggttttcgatttaatatattgtaatcaagttgtacgatatcaatttcgttgttgttattgaaatgatgaatgtattgtaaatcatgagtcgaaacaccgactgctcttactttgccatcacgttttaatatgtcaaatgcacgtagaaatgcttctgtttctctacgattatgccaccaaatatgacaaaaataaagatcaatataatctgtttgaagacgttgtaaacttgtttcgaatacggcgatgattttttcgggagtatcatatacaggaactccattagggtcgtagtgatgtccgattaaaccacctttcgttgataggataatatcattacgatgtcctttaatcgcggtagctaccaacttttcactatgtcctaaaccatacacatccgcagtatcaataaaattcacaccacactcaattgctttttttatagcggttatagattgtttatcgttaacaggtccccattcatcaccaccgattgcccatgcgccaaaacctatttcagaaacagttattccagttttacctaatgtgcggtaatgcatattccccctccttgtaagcatgttataacatggatatgtggggaaggaattttgtgtgtgaaaaaactcttctacaatagtagaaaaagaattacagaaactactattttatagcagcatgtataaaaaaaatcggtgtaaatatggaaatgtcgtcgaatgctatctttaattggttaatttatgggatatttttgtgaaggagtttattttataagaatagaatttagtttagtaagaaaacgtgccgatggtagtgaaaaatatgggttagggggatttgaatgaggaaactcgagcgagtaaatgttcctaatataccagagcaattatcacaacctagtgacaagcgtaggataaataaaaagaagttaaggcgacttattttaatggtcctttttattgcggcaactactctatatgttcaatatattttaacgaaacaacaagaagtaattgataaaaagaaagatacgattacggatcaaaagaagcaattagtatctttaaagaaagataaagattctttaaagactaacatagaaaatttaacagacgatgaggaagaaattttgaagttagcgagaaaagagtatcaattttctaagtcaaatgaaactatatttgtgatgccaaagtaataaaaacagttagccattgaactgcacccccaattgttagacaccgtctaacaattgggggtgcagttttttatgtatgaatgtcatggtacaaggaacaatcacatattgtagaaatgaagagtttaagctattttcataaatatggaatatgcactaaaataaatgttgttaaaattctgtcaattatattataatacaaggtaagcggatacattttttaatcaacgttgagttcctcgctcatacgactattaagaaacccgttatcctcgtataagaaaggaagatagctgtgtacgcctcaaatacaatttatatcgtaggggatgcgaaagcacctcaaaataatcccattactgaaaagtttaaaagctatttcgtagcatttatacttgttaaggatacaggggaaattgtagatgcagactgctcagcgacaattgcattaacatctcaatttgttaaatatttatttctacataaaaatataaatgacccggcgttagtaatggaagtaaagaaccgatatttcggttcttctcaaaaagcgttacttgtagcgctaaaagatgcacagaaaaaatataatcagattgctgctttgtctactcaatcatagacaaaatccagccgtaagaatcattcttatggctggatttttttatttcacattatcgtcctacatcaaaagtgaacgaaaacaaagtagagagatagaagagtaaatgcccaataggtttacctaataatccgtgggtataaatctccggtggattaaaatttcacttcattggagaatgaaaggatgaacaaaatgaaaattacagatgtaaaagtaaatcgtagacgtgtaaaactgcatacaccgtttaaaaccgcgcttcgtactgtaacagaaattgaaagtatagatgtttatattcatacagacgaaggagtgattggtaagggggctgcagccgcaacgccagttattacgggggatttcaccagcggaatggaagaagcgattttaggaccgatgcgttcatgtttaattggtcaaaatatcattcagtttcagcagttactacagggcattcaaatgagttgtattggaaattcaagtgccaaagcagcggtagatatcgctttatatgatgtatattgcgaatatcaaaatgtgccgttatatgcattgttaggcgggaagaaagaaattcataccgatattacagtgagtgtggatgagcctgtattaatggcaaaagaagcgaagaaacatatagaaaaaggatttcaaacattaaagattaaagtgggtaaagaggcgcatttagatttggaacgtattgaggcaattcgaaatgtggtaccaagaaatacgatattacgtttagatgcgaatcaaggttggagtccaaaagaagcggtctctattattcaagagatggaaaatcgtaatttaaatatagaatttattgaacaaccagtacacgcgaaagattgggatgggttaaagtatgtcaaagatcgtgtgcaaacgccaattatggccgatgaaagtatattttcagcaagtgacgcattaaagctcgttcaaggaagatatgcagacttcattaatattaaattaatgaaatgtggtggtatacgtgaagcatggcgtattgcagatatcgcagaaacagctggtgtgaagtgtatggtgggcagcatgatggaatcttcactttccgttagtgctgttgcgcatttagcggcagcgcatcctaatattcattattttgatcttgatgcaccgctttggttaatggaagagccagaaggaatgacttattctggatcaaaggtaaaccttcaatcgacagtgaatagtaagtcttaggagaagagactagtaaactatcttttaagggggataaatatgaaaaaagtaggaactgcatttttaacaactttatttatattttcatcgtttacatcggcaaatgctgaagaaaagaaggataataaagcatttatagatgtatctgctgcaacgttatggacagtacctgattcattaaggccaatcgatacaccgagtacaacaaatccagtggatctatggaaatggacgaaatcaatgacacttgacgagaaactatggttaacaaatgcaaataaattagaaacacaagcgttactcggtcaagaagtaactgttattgataagaaaggcgaatgggtgaaggtattagtgcatggacagccaacaccccgaaatgaagaaggttatccgggctggatgcctgaaaaacaattaacatataatcaagaatttgcagataaaacaaatgaaccttttgtcttaataaccaaaccaacagcgattttatatataaacccttctgaaaaacataaatcacttgaagtcagttataatacaagactgccgctattaagtgaagacacaatttcataccgtgtattgttgccaaatgggcaaaaagcatggatacgtaaaaatgatggaacagtttaccaatctcaaactgatattccaactccggcggccgatgatttaattaacacagggaaaatgtttttaggattaccgtatatatgggctggtacaagtggttttggatttgattgctctggcttcacgcatacgatctataaatcgcacggcattacaattccccgagattctggaccgcaatcaagagcaggagttgcagttgataaagaaaatctacaaaaaggagatttaattttctttgcacatgatcaagggaaaggtagtgtccatcacgtcgcaatgtatattggtgatggcaatatgattcactcaccaagagctgaaagatcggtagagattataccgctaaatacaccaggatatatagaagaatacgctggtgctcgtcgttacttaccttaaaaatagagggggtttttaaatgaaaaaagttgttcgttactcattagttagtactctattagtttcttcatttttagttggctgcgcaaaagaaaaaactgcaacaaagcccaaagatgagaagaaagtattacagttactagaaacgggtgaaattccgtcgttaaattcagggaaagtaacagatgcagtctcgtttaacgttttgaataacgtaatggaaggactatttcgtctatcgaaaaatgatgaagtaattgaagccggcgcacaaaaatatgaagtgagtaaagatggaaagacatatacattccaattgcatgatgcgaaatggtctaacggagatccagtaaccgcccatgattacgtatacgcttggaagcaattgattaatccagatacagcttctcaatatgcatacattgcgtacgatgtaaaaaatgctgagaagataaataaaaaacaactaggtctagatgaattaggagtaaaagcgaaggatgataaaacattcgtcgtagagctagaacatcctgtaccgtattttacgaaattattaattttaccatccttctatccaattaacgaaaaatatgcgaaagagcaaggtgataaatatggattagaagcaaataaagcggtatataatggaccgtttacattatcagagtggaagcatgaagctagctttacaatgaagaaaaacgataagtattgggataaaaaagaagtgaagttagatgaagtaaactatcaaattgtaaaagaaatttcaactgcggtaaatttatatgaaacagataaagttgatagagctgttatttctacagaattcgtagataaatataaaaataataaagagctaaaacaatatacagatccagttatgtacttcttccgatttaatgaaaatgtaccgattcttaaaaataaaaatgcacgtcttgcgctaagtacagtttttgataagaagggactcgcagattcatttttaaatgatggatcggttgcagcgaactattacgtaccaaaaggatttttaaagggcccagataagaaagattttagaagtacgtctggtgagtttaataagacaaatgtaaaacaggcgaaggaatattgggagaaagcaaaacaagagacaggtacaaatgaagtgactttagaattattaaattatgacttagaaaactttaaaaaagttggagagtacattaaagagcagcttgagaaaaacttaccaggattaaaagtgaatgtgaaattacagccgcatacgcaaaaattagcacttgagaagaagaaagaatatgaaatgtcgttatcacgctggttaccagattatccagatccaatgacttacttagaagtattcctttctggaagcagtgttaataatacagaatatgcaaatccagaatatgatgcattaattaagaagattaaaacagaattaggtaatgatgaaaaggctcgctggaaagcaatgcaagatgctgaaaaaatgctacttgatgatgcagtaattgcaccggtattccagcgtggattatcttacttacaaaaaccatatgtgaaagatttatatgtacatcaatttggtccagctacaagtttaaaatgggcagatttacaaaaataaaagaatggggaaacagacttcacgtatgtgatagtctgttttttcttatttaaagttagaaaaatagttcatggtataatttattagtctgtaaacagtatttgaagggaaaatgatgtctatgtttgaagaagagaaagtaatttatacaaaaagattatttatgaggaaaccaattgtagaagatattgatcagttttataacatattaaaaaaagatactgttggcaaatggctggctaaatcaagaggaatgtcgaaggaagaaacaaatgattatattgggcaacttatcttacattgggaacagtatgacttcggggtatggttgttatttaatagtgaaacaggaaagcttttaggacattgtggtttaagaaaggtagatgaaacaggtgaaatagaaattatgtatcttcttgacccagaacattggaggaatgggtatgcattagaagcagcagaggcttccattaaatatgcaatagagactttgaatgtaacaagaataattgctagagttaaagtagcaaatgagagctcgaaaaaacttttacgaaagctcgggtttatatatactcatgaagttgatcatagcgggcgcttattatcatattttgaactccatacatcatccaaagaattctagacatttcatatattttttcattgttaaaaaataaaattattactaaaattccagtgtgaaatttatgtagaatcttgtataattaacatgtttctatggaaacattttcttgcgctatttatatagggcttaatagaacaaggaaggaaatacatacatgtatataatagataaatagaatggaacatgtatagagacaaaggagagaaaagatgacgtgtcaaaaacaagggttacaatttaataacgatagaaagagggacagaagatgaaaatgaagcatgcttttggtcctataattttagcgtgtgtgctttttttcattatcattctaatcccatcgaaaagtttagtatcgcttattagtgataagaaggtagaagatgcggcaacttctttacaaaaagagaaattacaaagtgttttcttacagcaaaaaatgttagagaattcacagtatttaccgatgtacggttcatcagaatttttacgaatggatgcatatcatccgtctaattatttcaaagtaaatccagctggttttacaccgtttttaattggaactggtggtacacaaagtttagctcatattttaaatatgacatctactatggatgaattagaaggtaaaaaagtagtgtttgttctttcaccacaatggtttacaaagactggtgtatcacaaggggatttcactaataatttctccaaacaacaagcatatcattttatttttaatgatgagataaatccaggaatgaagaagcaaatcgcgaaacggctattagattataaagttgttcaagaagatgatatattaaaaaattcattagaaggtattgtatataatgatacgaaacataacataaaagcaggtttagttaaaccacttgcttatatgcatcgaaatattttagatcatagagatttatttaactctttatttaaaatcgaaccgatgaaagagaaaacaaatatcggacttcgttcaatttcttgggaagacgcacgtaaacacgcagaacaagaagggaaagcagagtctactacaaatacattcggaattgaaaatccgtattatcataaaaataatctgaagaaaaaactaaaaggtttaaaaaactttagagcaaatgaaacatatgatgaatcaccagaatacgatgatttacaaattattttagatttatttaaagagaaaaatgtcaaaccactctttatttctgtacctgtaaatgggccttggtatgattatactggcttcccgaaagaacgccgtgaagtgtattataaaaaagttcgagagcaggttgagaaagcaggatatccagtagttgatttctctggtcatgaatatgataagtatttcttaaaagatacgattcatttaggctggaaaggttggatttattttgatgaagcagtgcaaaaatttaattctgagaaataaagtatagaaatcggaatggctatgagccgttccgatttttttagtatagaggattttggtgaggacaatttgggaatgcatgtatatcttgaatctgtctataatcataatgtttcattgcgaactgggcttgataaggtattcatacacatataattgatcatcatgcgctgaacataatacaccagaagttccttgcccgttcatgaaagaaatgccgataggacgtccgattaagtattgtattttttgctgccaatgcataggggaatcactcctttttgagataatatacgaaagaaatgattgaatggttgcttatccatataaatgtagatggaaaggtgttatataattcctgaagattaatataaataaaaaaccgctataattctgaatttatagcggcttttttatattcttaagcaagatttttacgcttttttgtccatttttttataacgaagtataaaagtataagtacgacgccaccaattgcgaatgatttcacatacggaccagcaatatcgttaatattttcccaattttcacctagtttttcacctaaataaatgaaaataatagaccaagggataatcgcaagtgctgttagtgtagtgaaacgtagtaaaggcatttttgtaataccagcaggaattgaaatcgcatgacgcactactggaatgaagcgtgctgtaaaaatgacaccagttccgtaacgattaaaccaatcttctgcagcgtctatttgctttttatgtatgaaaatatattttccataacgttctaatatagggcgtccaccatatcgtccaagccaataaataaagatttgggcaataacaccgccaattgtaccgaatacaactgcgcctataaatgagatacttccattgaatactaagtatcctgcataagcaaggacaatttcacttgggataatctcaatcataagtccaagcataatgccccaataacctaatccttcaaaaaacgttaatactgaatgaataaaactacttaacattgttgcaccttctagtttatgaatttttgattataagaaccttttatttaatcgcataaaaggttcaccatatgtagattataccttatttgcataggggattgctatttcaattcttttatgtctctcataagtattatagtaaagtatataagccacgttttcatgaagggttaatgaaaagattattaaaaatttctcataaaaaatagaagcatttctgctcctattttttaaggcttgacatctaagttctgtaaaaataaagttgctgttacgtaacgctttgctaacatttgtacataagcggtatgtacagaaagggtcgcaataataatagcgttacgaattgcttcgcgttgttcgttattaatttgatcgaacttacttgcgattttatcagctttttcttttacgatgttttcaattgtatgaacggtatctgttgcatttaattgtaagcaattcccttgattgagttcttcaaatagagaagagtatgctacatataaatgaacaggattgattaaatcatcacttcgatcagctgggtcatttacaataaggcgtaatagcttacgaatggattcaaaatcaagtgctgtttttaaatcttcgacaataaatagtaaggctgcttgttcaattgaatatttttttcctttttgaggagagccaatcatttcttttatatctcgtttcacccagttttgcatagcagttacagagaaacttgtgttttcaatctgattgccaagcgcaactatttcatttaaagaaaaaccgacatcagtatcgtcaattttaatcagcttttcaaaaataggtgaaagtgcggtagtaataaaagctgtaacgctttgtccgctttcaatatcttttttatgtgactttgcccaagcttcttgtaaaataccgagaggctttttcgtattccatcctcttagtgatagaagaagggtagccatttcgtttcgtgtgagatgaaatgtttccatcttttcacctccaaaataataaaaagttcttatgaacttataatatgttttgtttcatttaaagtcaattctgttttgcttaatttttcctttgtgaccaaactgttgaaagtaaataatacttgcatatttcgacaaaagttcatataataagttcataagaacttttaaaatgttcttaaaaacaaatctatcattctgaatttactagaaagatagatttcacatatatctatataaaaggagaatggatataatatgttgaaaaaacttgtagcagtaatgacagcattcatggttatctttggggctagcagctttatgttcgtagatcatgcagcagcgaaaagttacaaatctggtaaaaaatcatttacaccaagttcaggtcaaaagtcaaaagttgatttaaacaaaaaagactcaaatgtaaattctcaaaaaacgactccagattcaaaaacgaaagcaacaaacacggcaccaaaaagtaataaaggaagctttatgaaaggtttattactaggtggtcttggtggtttactaatgggtagcttatttgcaaatatgggagctcttggttctgtattagcatttatggtaaatatgttagtaatggctggtatcgtaatgttagcagttcgtgcatttaaatacttcaaagaccaacgtaagaagaaggcagatgaagtagcatggaaacaataaaaatttctgaacaagagcttataaatgcgctttgtatatatatcgctgaaaaaagacaagtgggtccagaagaagtattagttgaactcatgtatgatgacgactacggtttctctgcggaagtagaggtaaatggtcgccagcaaattttaattcaagcaaacttaatcgaagctttacgcttattgcttgacagagaatataatgtcaatccattcgcagcgagattacaacttgaattagatgatgaagaaggcatttacgcattagcgaaatttaataactcagatgagtagagaagagagctgttgagaataatctcagcagctctttttagtatgtgcatatgtagatgagtaatcacgccaaatttcattcatctttcgtctaccgatatctaccatcggattaaactgaattgcagatttctgacgaacaaagtgaacgttttgaatggcgtgagataattgttggtcgactatatcacgttttttgcttgcatatttagcaatagatagacctgcaactgttccttgcgccatcgcaatttttccgctttcaatgcctgtaatattgccagctacaaataaaccaggaagaggagtttccattgtttcggaatggagaggaacgtgtccacctaattctgaaatgtaatggaagggacaaccagctacagctgcaagttcggcaagtgggtataatcccccggcaatacaaacaaaatctgcttcatatattttctctgatccattaataacatttcctttagagtcaatattagcaacacgtacaccttcaacttgatctgttccgataatttcaagagctgctttccgaaggtgaagtggcgttccgtttattttcattccgctgtttggatagaatgttaatccagcttttcgaacccaatcatatttcataaagtggctacctattcgcaaaatagcagaaggagcgagatgtgctgcatttaaaagagagtttaaaacttcttcaggttcaccagctttttgacttaactcgcttttctcagggagtacaatatgatccactgtaattcccgctaattgcaattcacttaaaatggcgaaagacaaaatgttagcaccaataataattcctttttttccaacttgcacgcgatgaacatttgtcataacttgagctgctccaattgacatcactcctggaagtgtccagccaggaaggggaatagaatattccgcagctccagtagcaagtagtacgaaaggcgcttctaacgtaccgatattagtatgtacaaaccaattgttttcatctctatctaaattatagaccgaaacaccgcacctgatatgtactgaaagtgattctgcttcttcatgaagtcgcttcgattcttttattccgttccaccattctccagtaggctcttgatgcaactgtcctaacaatctcccgcccggcttcataaattcatcaataacgagcacttttagtccgaaacgagcacaagaaatagaagcagataatcccgctggccctgcaccaataataattacatcactcatcgttttttcaccatctctctcacgatattcggatgctgtttcccgctttcaacaaccatgttttcttctacaacagttaagcatgcgcgtacatttgtttgattatttactgtcatgcggcattcggaacagtgtccgatattacaataaatacctcgcggtgttccgctatcttcatgaactcttactgtcctaattccatttgctaacagggcagcagctatcgtttcatgttcatatgctccgtattgatgaccgttaaattgaaaggtaatacgctcactactttgtaaagtacctaaaatagggtgatgtgtaattctactcatttactttcacctaccgatccaaaagtaactgcacgtattggtggttgatattttaacggtagttcattaagagttacgtcaggattcgcattttcaatcattcgatctatcattattctgcatgtgcgaccaccgcaaaatcccatgccagcacgtgttcttagttttaattctcttgccgagcagttatattcagcaattgtcgattgaagttgcccatatgtaacctcttcacaacgacaaacgattaagttgtttttatttgtcatgtgtattcctcctctagttcggttttcacaaattatatatgcaaaaatcatgccaatatagaggagggagagagggctacctgtaaacgcctgatcggtgcatactgattctttattgaagtccaagtttctttaaacggttatataaagtagcccttgttacaccaagttgttttgcgcattctaatttattcccatttaaaattcgtaaagccctttcaataacttttttctcatgctcatccatctcttcttgtaaagaaaggattgtattattgttgctgagtaatagggaatgggctgtatggttgtctaaagtttcagtcgtatgaaatggtaaatattcttgttttataattccgtctgttgcgaataccacaagccgttcaacaacgtttcgaagttcgcgaatattacctggccaattgtaatgaagcagttcatgcataatgcttgaaggtaagtcacgaattggtctgttatagttgattgaaaaatcgtttaagaaagaataggttaattcaataatatcctcgcgtctttcgcgcagcggtggaatctgcaagctaactacatttaagcggtaatataaatcttctcggaaagttccttttctcatttcttcttgtaaatcacgatttgtagcagcgataatacggaaatcaatattaatttctttttcaccaccaactcggtaatactttcgctcttgcagtacacgtaacagttttacttgcatatcaagtggcatttcacctatttcatcaagaaataaagtaccgccttgcgcgagttcaattttacctttttttcctttactatttgctccagaaaacgccccacgctcgtaaccgaataattcactttcaaataatgcttctggaattgccccgcagttaatcgaaatgaaaggcgccttcgctgcttcacttgcttcatgaattgctttcgcaaatacttcttttccaactccgctttccccaagtattaaaacagttgatttcaccgaacaaacttttctagctaattgtatcgttctttgtataacaggactttttccattcatcgcaaggaatggatcggattcatctttatactttgccacttcttgttctaaacggtgcatttcatgtgacatattaaatagtttttcatttaaagcgacttgatttgtaacatctgtttctgaaacgactgctcctataatttcatcattacaataaactggatttgaattaattaatacgaataaatcggggcgaggctgatggaactgagcgactatgctttttccatcatgtaaagattgtaaaatttccaagtctttataatcaaaaaaacgagtaatcggttgcccaataatctcattatggttgactgaaaatattttttcagcaccatctgtccaagttcgaacgcattctttactatcaattactgtaacagaagagtcagttgtttgtattacagtgtcataaaatgactgtagttcattgtaggacttataaagaaatggaatcatttgctgagaagttatacagcatatcggctcatcgttttcgttaaggatgataacagctaattcataagaaaaagcgtcaattaatgcagtgaatgagtcatctacataaataattgcgcaattatattcttctgtagtagaagggaggtaataaaacctttcgtttattttcttaatgcgatcaaggctacatgtatgattgattaaaacgctttccaaaaattcttgtatagtcggaaatgagaattccataatgtcctcctgttatgtataaaaattttgacagtgataaaaaaataatacacctatttactatgaatttaaaatatttttacaaataaaaatattttttataaaaattgtatatgtacagaattggcacgtcaattgcataaaaagaaagtgagagggctaggaaaggaggagtatattgtgaggcactgcgacgttttaattataggtggtggaataatagggtgttctatcgcttattacacttcaaaatacggaagagacgtaacaatcattgaaaaaggggaatttgtcagcgggacgtcttcacggtgtgatgggaatattttggccattgataaagacccgggatttgatagtcaaatgtctttagtaagtcaaaaattagtaactgatttaagtgaagaattagagcattcatttgaatatagggcaccaggaagtattctcgtatgtgagtcagacgaagagatggaagctgcgcagcaatgggtaaatcggcaacaagaagctggattaccgtttcgaatgcttgataggcaagatataagggaagagtcgcctttttttgctgatgatttattaggcggtttagaatgtgcgacggattcaactgtgaatccatatctccttgctttctcgcttctgtcagaggcacaaaagtttggcgcaaaagcttttaagcagacggaagtaaagagtatggaaatagagacggatggttcatttgttgtagaaactacgaatggaacttttacagcaaaacaagttgtaaatgcagccggtgtgtgggctcctaagattggtcagatgttaaatataaatataccaattgaaccgagaaaagggcatattattgtagcttcaaggcaacaacacgtaggatgccgtaaagtaatggaattcggttatttaatttctaaatttggcggaaaacgaaaagtggatgctttaactgaaaaatacggggttgcgctcgtatttgagcctactgaaagtcaaaatttcttaattggtagtagtcgtgaatttgtaggatttcatacgaggataaataatgaagtcattaaatgtatcgcaaatagagcaattcgcttttatccgaaaatggcagatatgatggtaattcgttcttacgctggtttacgtccgtggacagaagatcatttaccgattatttcacgagtggaacatattccgaattatttcattgccgctggacatgaaggtgatgggattagtcttgcagcagttactggaaaagtaattgaagagttattaaatgaaaaagagacaattattcctattgaaccacttcgtttgagtcgttttacagaaagggtgttaaacggatgaggtcacaaagagtctttacgacgattgatacacacacaggtgggaatccaacgaggacattaattagtggacttccaaagttgattggagagacgatggcagagaagatgttacatatgaaaaaggagtatgattggattcgaaaattgttaatgaatgaaccgcgtggtcatgatgtaatgtcaggagcattattaacagacccatgtcatcctgaggctgatataggtgttatatacatagagacaggtggatatttaccgatgtgtggtcacgatacaatcggtgtatgtacagcgttagttgaatcaggtttaattccggtagttgaaccgattacttctttaaaactagatacaccggctggcttagttgaagtagatattgctgttcaagatggaaaagcaaaagaagtatctttctgtaacataccagcttttttattgaaaaatattactgtacaagtgaaagacattgggactatagaggctgatattgcgtatggagggaatttttatgccattattgatgcgaaatcagtagatctagaattagtaccagaaaatgcatctacaatcatcgataaggcgattcatataagaaacacaattaatgagaagtttgaaatcactcatccagagtattcgtttataagaggattaacacatgttgaattttatacagatcctactcatgaatgtgcgcatgtgaaaaatacagttgttgtaccaccaggcggaatagatcgatctccatgcggtacaggaacatctgcgaagctagctgtattatacgctcagaaagaaatcgaaattggtgaagagttcattcatgagagtatcgttggttctttatttaaaggatatgtcatgaatacgacacatgttgaaaatattgaagctgtcataacgaaaattacgggatcagcttggcttatgggtatgcatagatttttttacaatgaaatggatccacttaaagaaggatttttgctaattccgccgatggaacatgaaacggaggatataaaatgaacattcaaaaaatgtatacagcagtagacgtacatgtaaatggcgaggcatttcgtgtaatgaaagacgtaccatgcaaatactactacagtttggagcaattaaatgaacaattttcaggtgaattagcagaagagatgaagcttttattaaatgaaccacgtggttttatcggtttgaatgggtgtattgtcgttccatctatctataacgaagtggatgcagctgtattattttttaatcatgaaggttcggttccgcttcattatggaggcattgttgcagtaataacgatgttactcgaaagtgggtatttaaaaaagagagagtccaatcaatacaaaattgaaacgttatctggaatatttttagttcatgcgtatgtagagaatgatgaagttatatcggtttcgtttgaaagcaaactatgctatatgattgagggaaatttacaggttggtaatgtaagttattctctcatacaagcagataaagtatatgcagttgtagagaaaggtgcgtattcgccagaaattcgcatggaaaacatttctgaattgaaaagatggggagaagctacactacagactatacaaaaacagtcgctaataaaaaggcttattttagtagatccttcgcaaaaagaaaagaaccatataaaatcgattacatttcatgaagataactttatcgtacattcgccaggttttgtttctactattgtttcctatgttcatgcgttatttaaaaatgattatatggcggataaaccttttaaaaatgaaagtatatttaatagttttataactgtggagaaagtgaagaaggaggaactaggatacattttccgttttgaaagtagagggtttattacagggatgcagacgtttctattagaccctacggatccgtttccggcaggtttcttattaaaataaaatgtgataaggagagataaatatgcaaaaaattaaaggggcatttccagtattaataacaccgatggatgaatttcaggaaattaattgggatggggtaaagcaaaatgtaaattactttatcgaacaaaacgttgcaggtatcatcattaatggaagtacaggagaatttgtaagtttatcaaaagaagaacgatttaaaatggtagcaaccgtgttgaaagaaattgatggccgtattccagttattgttggaactgcagcagagacgacgaaagaaacaattgaatatacgaaacatgcagaagcgcacggagcggattgtgcattaattataaactcttactattgtaaaccgaaggaagaggagatttattttcattttaaagaaatctcaaactctgtaaatataccaattatgttatacaataatccatttacttctggtgttgatatgagtacagagctaatgctccgtattggaaaagagtgtgaaaatgttacacatattaaagaatctagcggagatattcgaaaagcgagagatttagtaagacaaagtgaaggggctttccaagtcttctgtggttctgaagatttagttatggaatcatatttagttggtgcctcgggatgggtttcagtagcaggaaatatcgttcccggtctcgttacaaaaatgtatgagcattttcaaaatggtgaattagaaaaggcgtgggaaataaacgatgctattttaccactttgtgagtttcttgaaggatcagggaaatatgttcaaatcgttaaacgttctatggaattacatgggcaagcgggaggaccttctcgctatccaagactagggttaactgtagaagaagatcaaaagcttcaaacgattttatcaaatattgcagctcatgcagctgtttaaataaggaggagaacataatgttaaagacaaatattgagctgaaaccaaaagtggaagcgtttttaaatgaagaaattaaaatgtttattaatggcgaatttgtttctgctattggcggaaagacgtttgaaacgtacaatccagcaacagaagaggttctagcagtcgtatgtgaagcgcaagaagaggatattgatgctgcagtaaaagcggcaagatctgcatttgaatctggcccgtgggcagaaatggctactgctgaaagagcgcatcttatttataaattagcagatttaattgaagaacatagagaagaattagcgcaactagaagctttagataatggaaagccatatcaagtagcacttgatgatgatatttcagcgactgtagaaaattatcgttattacgcaggatgggctacaaaaattattgggcaaacaatcccgatttcaaaagattacttgaattatacgagacatgaacctgttggtgttgtaggacaaattattccgtggaattttccgcttgttatgtcttcttggaaaatgggagctgcactggcgacaggttgtacgattgtattaaagccagcagagcaaacgcctttatctttactatatacagcgaaactctttaaagaggctggatttccaaacggcgttgtaaactttgtatcaggctttggtcctgaagcaggggctgcaattgtaaatcatcatgacattgataaagttgcttttacaggatctactgttacaggaaagtatattatgcgtcaatctgcagaaatgattaagcatgtaacgttagagcttggcggaaaatcaccaaatatcattttagaagatgcggacttggaagaagcgataaatggtgcattccaaggtattatgtataatcacggtcaaaattgtagcgcaggatcacgtgtatttgttcatcgtaaacattatgaaactgtagtagatgcacttgtgaaaatggcgaacaacgtaaaacttggagcaggtatggagaaaggaacggaaatgggtccactcgtatctaagaaacaacaagagcgtgtgttaaattacattgagcaagggaagaaagaaggtgctacagttgcggctggtggcgaacgtgcgcttgaaaaaggttatttcgttaagccaactatattcacagatgttacagacgatatgacaatcgttaaggaagaaatatttggaccagttgttgtcgtacttccatttgattcgacagaagaagtaattgaacgagcgaacaactcatcctatggccttgctgcgggtgtatggacgcaaaatatcaaaacgggtcatcaagtagcaaataaattaaaagcaggaacagtgtggattaatgattataacttagaaaatgcagctacaccatttggtggatataaacaatctggtattggccgcgaattaggttcatatgcgcttgataattatacagaagtgaaaagtgtttgggtaaatataaagtaatagggcgttttactgataaaaattgagggatgaaataatgaaagatgcggacaactagaaagtttgataatagttgtccgttttttttatatacaaaattgcttttccaaagaatgataagggggatttggatggagaatttagtagaatggttagtagggcaagtgtggagtatcggtttagttgtttttgcattaggggcaggcgtatatttcacgattgcaacacgctttttgcaaatccgttattttaaagagatgattaaactattatttgaaggaaagagttcagagacgggaatatcatcttttcaggcattttgtttagccttatcaggaagagttggaattggtaatattgcaggggtagcgacagcaattgctttcggcggtcctggagctgtattttggatgtgggtaatggctttgttaggggcagcgagcgcgtttgtagaatcaacattatctcaagtatacaaaagtaaagtagggaatgaatatcgcggcggtactccatatttcattgagaaaggtttgaaaatgaaatggtttgcagtcattgtagcagtagttgtaacactttcatatggcgtgttattaccaggtattcaatctagtagtatcgcagttggatttgaaaactctaatggtattagcaaatatataactggtatatttttagtcgtgttactagcagcaattatttttggtggtgtaaagagaattgctggcgtttctcaaatgcttgttccatttatggcaattggttatgtaattgttacatgtatcatattaattgcgaatgtaacggagattccaagtatgtttgctttaattttctctagcgcatttggtgtaaatgaaatgtttggtggaattgttggtgcagctattgcatggggcgtaaaacgcgctgtattttcaaacgttgctggtgtcggagaagcgacgtatagttcggcagctgctgaagtatcgcatcccgcaaaacaaggattagttcaagcgttttccatatatatcgatacaattgtcgtatgtacagcgacagctcttatgattttaataacaggtatgtataatgttatacctgaagggaaaaccgccattgtacaaaacataggaaatgtggaagctggtccaatttatacacaacaagcagttgaaactgtgataacagggtttggtccaatatttatttcaattgcgattttcttttttgcatttacaacgttactcgcttattactatatcgctgaaacgacacttacttatttagatcgtcaactgaagtatggctggttaaaaccagttttgaaatttggatttttaattatggtttacatcggtagcgttgaatcagcgtcgcttttatggaatcttggagatttaggaatcggtagtatggcatggttaaacttaatcgcaatcttacttttaagtaaaaccgcattaaaagtgttaaaagattatgaaacgcagaaaaaagaagggaaagatccagtatttaatcctaaaaatgtggggattgaaggattaacattttgggaagaaagaagtaaagaggttgaaagaaaaagttctagagaaaaagttattgtcgatgataatttaaaattataactcaaattaattgaaaattcttaatttaaaagaaggtatattgcctccatttcatcacatactacaataagtatggataatatgactggagggaataagatggaacatgagcaacatagttcgataaatgatattctacatcattataaagaaggtataggtagttttacaaatcaaattcctgaaatcgctgagacatataatgcgttcacgcaagcttgttttcaagagggttctttaacaaaaagagaaaaacaacttattgcattaggaattagtttagcaacgcaagatgagtattgtacaatttatcatacaaaaggttgtcttgatcaaggatgttcggataaagagattctggaagcatgtggtgtttcagcagcatttgctggcggagctgcgatgagtcaagcggtaactttagtgcaagagtgtttaacagaattgaaaaatcaaaagcattgaataaaaaaacgttttaaactttatgtttaaaacgttttttatgtgaaattaaatttaagtataaaaattatctaggatgggttcaatttatggttatacaataatggagaattttaaatttagtaggaatgagaaataaaaactatttatttagttttaaggttttgtaaaaagcttcaattgtttcatataatcaatagcttttgttttgtttttctgtttagaaacataatgtgcctcattaaaatctctatagtaactgttaactacttcttcagaaagagcaccgtcagatatagctcttttaaccgcgcagtttggttcatttgtatgtgaacagttagaaaatttacatctcatagaaatctcttttatatcttcatagccaaaatcaaaattcctctcaaggtttatcaagtcaaatcctattttactaataagaaatccctccacttttgaaagagtcttttagaaacatacatacaaattttatcgttttcaatttgtattcactttaatattctatatcttcataaatagatttttctacatcaggaagaactgtgtatatactcttaccgattaaagcttctaattctttcttaatcgcataaaaccctttccaatgtaaagatgtatgagatgttgtaccatgacgcaaaccaacagaaattaatcttctttccagcgtagtaaagccatccgcatcagcaagagcgtcacaaagagtaattactttattgtataagtcgtagttacaatgttcatttaatatttcaactaatcggcttctcatatggtcaggaacgagactccattctgctgcgatatctatatgttcatttttgcatgggaatgagtgtgtcacacaaataacagcgtttcctgtataccctaaatcattcatatacatataaccatcataggaatgaatgaccgatttggtaaaacctttgtatcttccgatatcatgcaaaagggcagcgttatatgctatgtcagcatctagcttgtaccctttttttataagttctataattatgttttcagttgcatgagcaacatgtagtgaatgttcaaaccaagggcccgggttttgttcatatgcccattcgagtaattcttttgcgtacattctatctaatatatatttcatatcgttatcctttcacaaaaaatcatatcttaactataaattcctcttattatttcattattccttctttaaaaattgttacaatgaaacaaaagggggaaaagtaatgcgaaatttagtaattgaagaaattaagaaactagaaaatgatatagaagaactttcgaaacttttgaaaatggttgtaaatgatggggcatcaattggttttttgcctccactggaacaaaaagatgcaacaaagtattggcaaacagtattagcgccagaagtgatattgtatgtggctaaaataaacaacgaagtagcagggagtattcaattacaattagttactaagcctaacggaattcatagagctgagatttgcaaattaatgactcatccaaactttagacgaaacggtattggacgatcgcttatgcaaaaagcagaggaacgagcaaagcaagaaaacaggtctcttttagtattagatactagagaaggagatccttccaataaattgtacaaatcactagactaccaagaagttggaacaataccagggtatgcaatttcttcgaatggaaagttagatgctacggttctttattataaaaacatttaagttataatcaaacggggagagtgcttaattattagtaagtgaataataaacgactatttttaacaccgtctatatttttctggcggtgttaaaatagttaattataatctaattaacgcactaaatgaatttgagaaagtttttagagggttcttttagtaatgattctcgtcttataataaatgtagagaagatgactagccgactatagttattttcgctttattatgggaaggggatgaaagaatgaaaaagaatagtttacaaaagatgaagaaagttattttaagtggtggcgtattacttacgggattattaacatttgggttttcagaaaaggcttcagctcatggatatgtagaatcaccagcgagccgatcttatttatgtaagcaaggtgtaaatgtaaattgtggaccaattcaatatgaaccacaaagtgtagaagggataggtggatttccacaactaggaccttctgatggacaaattgcaggggctggtcattttcccgctttagatgttcaaactgtagataggtggaagaaagttacgttaaatggcgggacgaatacattcaagtggaaactaacggctcctcatagtacgaaagagtggaaatattatattacgaaaaaaggttggaatccaaataaacctttgacgcgatcagatttagatttagtgccattctatgtaaaaaatgacgggggagctagaccagggacaacagtaacgcacgaagcaaatgtaccaactgaccgtagtggataccatcttattttagctgtttgggaaattgcagacactggaaatgcgttttatcaagttatagatgtaaaccttttgaataatggcttatcctcaaattttgcttttaacaatgtagtgcaagctcctacactattttaattgaaacatacatttcgatcatctaattcattttagatgattttttttatgaaaatgatgaaaaatatagaagaaagtgcaattatttataaaaaaatatgctttaaatattgtcatatttgcttctttaagatatccttttcatgaagaggtggaaaacatggaaaaagtactagttttcgggcataaaaacccagatacagatgcaatttgttctgcaattgcttatgcagaattgaaaaaagaattaggaatgaatgctgagcctgtacgtttaggcgaaatcagcggtgaaactcaatttgcgttagactattttaaagtagaaggaccgcgttttgttgagacagtagcaagcgaagtggacaacgttattttagttgaccataacgagcgtcaacaaagtgctaacgatatcgaatcagttcgtgtgttagaagttattgaccatcaccgtattgctaactttgaaacaagcgatcctatatactatcgttgtgagccagttggctgtacagctacaatcttaaacaaaatgtacaaagaaaatggcgtaacaattcgtaaagaagttgcaggtttaatgttatctgcaatcatttcagattctttactattcaaatctccaacttgcacagaacaagatgtagcagctgctcgtgaattagcggaaatcgctggtgtagatgcagataactacggcttagaaatgttaaaagctggtgctgacttaagcggaaaaacaatggagcaattaatctctcttgatgctaaagaattccaaatgggtaatgcgaaagttgaaatcgcacaagtaaacgctgttgatacaaacgacgttcttgtacaccaagcggaacttgaaaaagtaatttctgcagtagtagaagaaaaaggtttagacctattcttattcgttgtaactgatatcttaactaacgattctgtcggtcttgcgatcggtaaagcagcaaacgttgttgagaaagcatacaacgtatcactagaaaacaatacagctactttaaaaggtgttgtatctcgtaaaaaacaaatcgtaccagtattaacagaagcattccaagcttaatcgtattgcgtacagatgaacagtaaggacaagtagtcagattggctatttgtccttttttatttataataagcagaaatttttaacttttaaacagtcgcattgtgtatgcttaatgatatggaagtattgaaaagtaaattacaggggctttttgaaaaaatattgcatctgtttcaaaattagagagctggatttcggaggaactgcgtttaaacgctgaaatacagatgttgcgtttaactttttagaagaaaggatataaagttttgattaacgaattaaaataaggatagcgttagctatccttataatcgtttattcgtaagattttttcttgtttatataaaatgtgattatcgtagtaatgaagaaaataggtatcgcatacacttgcccaacaaataacttccagccgacataattatagccttcagatgctgggatgataacggaaataacgcaaacgataaaatagactaatagtgcaggaataatatttttcatttttatgaacctcctttattgttttattaatacatacttgcattataatttagtttcattattttgaagaaaaaatgaaaaattttttatggtattataatatttgcaatgagagtaatctatagtacgcatatggtaaaatgtgtaattttaactttcagaattattatatagtatctcgagaaaaaaatgtacaaaataacgaattttatttaccaaagtaaagggagtagaaatatatatgaaaaggctatgtataattccatgcggaaaaaagaaaatttgggataaacattcagactacggaccgatggaagcaaaagatgtatatattagtccgttcggaaaagcatgtcaggcgtacgcaactatgtttttcgaaaactgggttatattatcagcgaaacatggatttttaagaccaagtgatattgtattagaaaactatgatcttgcatttgattcaaaaagcgatgaggtaataagtatagagcaattacaaaaacagatggtagataaaagtttactacagtttgacgaaatcgtcttactagcagggaagaagcataaaaaagtagtgacaaagttatatccagaagaaatgattacatatccgctagaggggtgtaaaggaattgggtatatgttgcagaggttgaaagaagctgtgaaggaaggggaggaaatataggtgtagtttcagtgattttaaactctatttatttagggagctgaaaagtaaaatagagtttttaggcatcgccgaaagggtgatgcttttttgttcgtgtcgtcattcatgtaaaagtaatttagagaataaatcattcgatttatgaagcgatagcttttttatatcgaaaacaaattgcataacttttagaaaatataggacgtatgggcacagttaagattgtaagtgggaatagcaataagacaagttttgaataagatattaagaaaggagatgttgatgaataatggctagatatagtttgcacggaggacacaatagtattgttcaaggtgctaatttcgggaatcggaaagaacacgttctagataggcaagttaaagatgccgtggcggctaagttaagagccctaggacacacggtttatgacgatacggacgaggtaggggcaactcaatcacaaaatttaaataatatcattcggaatagcaattcccatgctgtggatttagttatttcttttcatcttaatgcaagtgatggaaatggacagggtgttgaggttttatattatgatcagaaagatttggcggctaaaatctcagctcaactagcaaaagatattggatggcgtgatcgaggtgcgaaacaacgtacagatttagcagtattaaatggaacgaaggcaccggctattcttattgaattagggtttattgataatgaatccgacatggcaaaatggaatgttgataaaatcgctaattctattgtatttgctcttacaggacaaactggaggaggtgcagcgaatttgctcaaagtaaaaactggtggtgtagcatttagtaatttacaagatttggctcaagctatggttgatgcgggtattgatggacaaattgtcgttcaaaaagatggcattggttatgctataacgaatggctatccgtccgggaatatcgataaatttacagcttggttagatgcacgtaaatggtactatgagtacgtgagataaaacgaaaattggtttgattaaaaactaaaaattgtcttatttttagttaacaagtatattaagtaactataaaaatatggacaatttatatgtaaattagtacacaaaaccacctgtcagaaaggtggttttatttatcaagctatttgcgggaagtaaaattctcacctcaaaattcggatgaagctaagaaattaggtgggaattacactgctcgtagcctcctactaattatcgtttcactttatatagtttagagttttgtaaatctttacttattaaacccgtaataatattttgttttctcaatacataagccgaattttaaattattacccaataatataatacctctcatactatttattagttgataataacaaaaaaacaagctttgaatataataatgaaaaaggagatgttaaataatgggttatattgtagatatttcgaaatggaatggcgacattaactgggatatcgcagcaccacaattagatttcgtaattgcacgtgtgcaagatggttcaaactatgtagatcctttatataaaaattatgtacaagcaatgaaagcaaggaatattccgtttggtaattatgcgttctgtcgtttcgtttcagtagaggatgcacggatagaagcaagagacttttggaaccgtggtgataaaaatgcaacagtttgggtagctgacgtagaagtaagaacaatgaacgatatgagagcgggtgcacaagcttttattgatgaattacgcagattaggagctaagaaagtcggtttatatattgctcatcatatgtatgctccatttggaatggaaaatgtcaattgtgattttgtatggattcctcgttatggtggtaacaaaccggcgtatccatgtgatatttggcaatacacagagacaggaaatgtggctggtatcggcaagtgtgatttaaataagctgattggaaataagccgttagcttggtttacaaatcaaattgttgagccgataaaaaaacaagaaggggttggaattatagtgaataaatatagcaaagtagttacttatgaatttggtgtaaatttaatttctgacatgattcaaatgatggataagcttggatatacttctaaaataatatctcgtggagataaccaagggcttgtgtatttcgaaacagattatcgtcaagggaacgaactggacaaagcaactgcttggttagatatgaaaggaattaaatatttttatacaaaagagtagtttgcaaaaataagagccgtcatgtgacggtttttatttttatttaatcttttaactctacttataatatggagaaaatagactaataaacaagcctttgtatactttcaaacatagaatatgatgaattctatcaaggaggaagcatatttatgagaaatacttgtcattgtggacattttcaagattgtaataaattttgggatgatttaatgtttgggagatgtagatgtaagcgcaatgattttcacgagtgttgttgcaaagagaaaccgaagtgtgagtgtgaaaaatgtcattgtaaaacaaaagcgaaatgccattgtaggcatgaagaggaagggtattaataataaaaaagagtacgattggtcatctccctgtcaagtagacagaaataaaaagagtattatgccacggccttttcccgatattctatcggggaaaggccaattcatggatattttgaaaatcgaaacgcctagttaatttagctaggtgtttttttatatggccataaattctttatcgaagtagcacttgtccattaagttgtttacaatcccgttgaaataagcgaatttaccctttttcatttttactccggatttaattttcataacaaattctttaatagcttttaagccaatagctaactcttgttctttagtaaatgctgtatcacctgttgtatggttaacgattttattacactgtcttacgaccttccacagttcttgaattgttttagattcactgtaaaaagagccaactaaagaaataaaacgctctggtacccaatgagcaacaaagtcagcttgttccatattctcttttggattattgctattctcattactattacgtttgtttatatcttttatattttgttttaaggaaacaggttttgttttaatggtaggacactttgtaggacgttcaccttgtgtcttgttggacacttcttccacaataggttgaataataatagcgttagaagtttgaagcatatcttttttacgtttcattgccacctgtttaatcatctctagatccacaagcttcttcattaaacgttgtacagttttatatgaaacttccattttttcagcgattctgtttttgcacaggaaactaacacctacatatttgcagctgtggcgctttaaaatttcaagtaatgtaatgagtttagattttacatctgtacgcttaatagacatacggatagtgtctctgtatgcacgtatagctctatttagttcgtccacatctttgaataatgataagttgcggaaggcttctttagttgcgataacatcaatacgtttctttttcataatgtaggcccctttgcatatacaaaagagcaacagaatgccaagtgtaagcaaactgttgctaaggagcccttacgtactgtaaaatagttcgtaagagtacagcaagtgtttgcctagatggattaggcggatggtatatagagtgttggtcgcactttatatacacgctgtgctcttttattgtagttatatagtgtttggtcaattgatgactgggccacagcttttagctcatttagcacaaattcatgtttggtttaaagaatatggggtaaatattaaggaataagggaaaagcggcttacaattatgtaagccgctttttattaaagaaattatcatataaaattcaaaatcaccttataaataatacttaattagaattattattttgacgtacttattattacttgttataattggaaacaaacgttctgaaaaagattctcatttataaaattgaggtgttatatagatgacaaagaaaagaataggtttactcgtaatggcgtatggaacaccagaatcattagacgatgtagaggcatattatacacatatccgtcacgggcgtacgccatcagaagaagcgcttgaagatttaattgggcgctataaagcgattggtggaatttcaccgcttgcaaaaattacgaaagaacaggcgcataaattaacagattcaatgaataacatatttacagagtatgaatttacttgttacttaggtttaaaacatattgcaccatttatagaagatgcggtagaagaaatgaagcgtgatgggattgagcaagcgattagtatcgtattagcgccacattactctacatttagcattaaagcgtataatgaccgtgctattcgtctttcgcaagaaattggtggtcctgttattgaaccaattgaacaatggtatgatgaaccgaaatttatttcgtattgggcagaccaaataaaagagacgtttacagaaattgataataaagagaaagcagtcgtaattttttcagcgcatagtttgccagaaaaaattattgcaacaggagacccatatgtagaacaactaaagcatacggcagatttaattgcagaagctgcaaatattcaaaactatacaacgggttggcaaagtgctgggaatactccagatccgtggattggtccagatgtgcaagatttaacgaaagatttatatgaagagcatgggtacgaatctttcgtatattgcccagttggttttgtagcggagcatttagaagttttatatgacaacgattatgaatgtaaagttgtaacggatgaattaaatgccaaatatttcagaccaaatatgccgaatgcacaatctgcatttatcgactgtttggctgaaattgtttccaaaaaagtgaaggaaatagttgacaaagatttagttttaaataataattaatttataataattttaaataaataatgattactacgaaagaaagaggaggatccccctagatgaatccaaataatcgcttaacaacaaaccaaggtgctccagttggagacaaccaaaattctcgtacagctggtcgtcgtggaccagtattattagaagactatcatttagtagaaaaacttgcgcactttgatcgtgaacgtattccggagcgtgttgtgcatgcacgtggtgcaggtgctcacggtgtattcgtaacgaaaaatagtatgaagcaatatacgaaagcagcatttttacaaaatgaaggaactgaaacgcctgtatttgttcgtttttcaacggttattcatggtcaaggttctcctgaaacagcacgtgacccacgtgggtttgctgttaaattttatacagaagaaggaaactacgatatcgtaggtaatcatttaccagttttcttcattcgtgatgcaattaaattccctgatatggtacattccttaaaaccagcacctgatacgaatattcaaacgccagatcgttattgggatttcatgacgttaagtccagaatctacacatatgatgacatgggtattttctgattacggtacaccagcaagctatcgtgaaatggagggtttcggcgtccattcatttaaatggattaatgaagaaggtaaaattgtttatattaaataccactggaaaccacagcaaggtgtacgtaacttaaatgcgaaagaagtgcaagaagtacaagggaaagacttcaatcatgcaactcgtgacttgttcgatgcaatcgaaaaaggaaattacccaaaatgggatttacacgtacaagttatgcaattagatgaaatggactctttagactttgatccactagatccaacgaaagtatggccagaagatcgcttcccattaatggaagtagggacaatgacgttaaatcgtaatccgaaaaacttctttgcagaagtagagcaagtagcgttctctccaagtgcaactgtaaatggtattgagccatcggaagataaattattacaaggtcgtttattctcttacccagatacacagcgttatcgtcttggtgcaaattacttacaaattcctgtaaactgcccatacgcagctgttcataatcaacaacgtgatggtgcgatgcaagtgaatcaaaacccatctacaatcaactacgaaccgagtcgtcatgcagagaatccagttgaagacaaagcttaccgcgattcaactatgaaagtagaaggctatgtatctcgtgaaaaaattgagaaaccaaatgacttcaaacaagcaggtgagcgttaccgttcattctctaaagaagagcaagataacttaattgcaaacttaacaaatgatctaaaagacgtaaatgaacgcacaaaattattagctgtttgtaacttcttccgtgcagatcaagaatacggtatgcgtttagcgcaggcattaaatgttgatattacgcaatatgtaggaaatgctccgaaataaataggaaaagacgaccgggtttcggtcgtcttttttgtataaagttatgtcggtattttgcatgtaaaacatgtcgcaatttgttggtaaatcgatatgttgtgtcgaaccgttgatatattgaaagaaacaatcgatatatttgaaaaatcgttgatatattcaaaaaatcgctgatatattctccctaataccagattgggtattgagaaatctatgtaacaagttcccattatttaataaggctaagtggcctgagttctacgatagataggaactcaggcttttttatgcaaaaaatttatgaaatctttttggaataaaactgaggacaagaaagagggcgatttctcctaaaatagcgacaatgatattgaataaaaaggtacggaaatttgcagtgatatgagtaagaatcgcgtatttccaataagataagctcatgaaaatcactccttgtagcattttttatagtatataaaatttgtttcgtaaaagtgcgtgtcttagtttgtgatttgcgaaaaaacaaaataaattctcaatataatttcaacaattgagtaataaaacatggaatatattacctgtttaattgcataggaataggagtgtttacaaaaatattttctgaattaacataaaatttacaaaaaactaataaattgttgaaataatacaaacgtaaatatatactctatatatactttttacaaaaaaaggatgtgatgaaatgaattacatgtttacttggtaggataagattgattcattttacaaattcgaaaaaattaagtgaggagaaatgtacatgtttcaatttatgaaatcaccaatcggtatagcggttggagtagcagcggttatattagcgtcaccaaaagcgagaaaggggctaagaaagctagcggtaaaaacagtatctgcttttctcggtgcaaaagaacaaattcaaaatgctagttcagaaatggaagaagctttaccgaaagtaaaagaagcggcacgtaaagtggcagtaaaaacagtatcgccaattattggagcagtagaagctgtaccgacaactatttctaaattccaggaaaaatgggcgtctcgtgtaaatgcatatcattctgagcagagtgtagattacgaaagcatacctgttactccttagatagtaagtgattttacttcctttacaaggataaggaggatgatgatgcagagtaaattattaaaaacgagatttatacgatcgttacctggaagaattcgaattgaaatatataaactaaaatacaacttggacatggcgaacttgatagtagaacgttttcgtgacgtggaaggtatttatcaagtgagtccctctatctctacaggaagagccctgattacttacgatatcaacaagacctctctacataccgtttgtgaaataattaaactcctagaagaacaaactacaaagaatactaactttaacaatattgaagaaacgaagaaagcagaagattcttcatctagtgtaatttcttacgagaaaaaaggtgaaggtgttccattgccactagcgctttctgtcgctggattaggtgcgttcggtataaagcaactatttatgggaagatcagctttagctagaagtccagggcttttttacttgtcgggggctttatctgttttgacgggatacccgtttttaaaacgaggattcaaaaaaatggttgctagcaaaaaagtgaattctgatctagtgcttggcataggaacgcttgcactcgcactagcgcgggaaaatatcgtcgtactagcgggacttagtctattaaattatttaaattggaagcgtagtcaagcgaacataaatgaagagaaagattcgtataaagaaagaattttatccccggagattaaagcatacagtgaaaagcaatcgaaatggggcatgctttttgggggagcaacatgggcctttacgagaaatccactacgcggaatggcggttttattagctgcgaatccgaaacctgcagtttcgtctgctgagtatgcatggcgacaaggagatctcgttgcgagggaaagaggatatcttattccaaatgaaggatcattatctcaactgtcccgaacgagaacaatcgtatttgacgatgtatcgcgtatattctgtcatgaagaagcggagattagctgcatttcagaagatgaagggcaagtttggtgcacggcagcctcactgctggagaaaagtgggcatgattggaaagaggaagttgtgcaacgagcgaagcaaacaggaagaacgttaaggaaagcttttgaaatcgaagttgatgacgaagggataaaaggtgacatacaaggcattccatcctttatcgggagtaaagtatttgtgcagcgaaatggtgtagatataagtgcttatgagttagaagcgaaaggacttggcaaagaaggatttaacgttcagttcgttgctaaaggtaaaaaatgtgtaggattgttagttggatcgaaaatgacgattacacctgaattcacagaaataatgaaagaattaggtgaaaatcagtggaagtttgcagttttgcaaaatagtttacatgtaaatcatagtgttctttcgcagcacggtattgatgcaagttggcaacatagtgatgttgtagagcgtgtggagcgtattcgttcggatggggaagaagtattatttgtttgtgaggataatattgaatttccgtctgtatcttattatgaaatgaaaaatatatttcagtcaatcgcctatgcgaaacaaatcgatttattagtgaaagaacattttcgagtagcgaaaatatggaatattgccggggagatgctggctgtttggtctatattcacggcacctattatcgctttaatggcaaatgctctatctttaacgtttttatctagagcgaagcgagtaagtgagaagattttttctaataaaaagttactgaatatgaaccactcggtagctagagaaacttctacaaaatggtatgcactctcgcaagaagatgtaataaaagatttacaagtggagaaacagcaagggctaagcgctcgagaagtgcaaatgcgacaagaaaagtatggaatgaatagaattgaaccgaagcagtctgttccttggattgtttcatttatggggcaatttaaagagtttacatcgcttattttacttggagcagctggattatctgtattatcaggtggggtgtttgatggattagcgatggggacaattctcgtcgtcaatgcggtaattggaacccttcaagagcgaaaagcagaaaaagtagtagaagctttaaatcaattccgtgcgccaaattgtatagtaacccgtgaaggggaagagatagaggtagcaagtagtgagctcgtcccaggtgatgttgtctgccttcaagctggagaccgcgtacctgcggatcttcgtattatagactcttggaatttagaagttaatgaagcgatgctaacgggtgagtctctaccagttgaaaagaaagtggatgcggtaggggaagaatgttcgttagcggagcagaataatatgctctttatgggcacatccgtaacgcgcggcaaggcgagagctatagtagtggaaaccgggatgagtacagagatgggctatatgatttccttaatgaagggggaagaaacagagcctacaccactacagcaaaaggtgacgtctattagtaaaacctttattaaaggagcatttgtggctggcggtattgtgcttgtagcaggattgctacgcggtttaccgattacgcaaatgattacaacatcagttgctcttacagcatctgctgtgccagaaggtttaccgattatgattacaatcgctttaagtgcaggaatctttcgtatgcaaaagcaaaatgcacttgttcggaagctttctagtttagaaacgttaggtagaacaactgttatttgttctgataaaacaggtactcttacgaagaatgaaatgacagttaaagtcattgccacaccaaatcgtatgtggagtgtatcgggtgatggatatgaaccagttggtacaatatcggatgtaacgtcgtctaaagtcgcagctgctgtagagatggaagtagaagaagcgacttatcatgaaagtgaaaaaacgccgttagaacatccagattttgttcgcgttctgcaaattagtgttctttgtaataatagtaagttagaacatgaagacgatcagtggattgtgaaaggtgacccaactgaaggggctttattaagttttgcttctaaagcgggtgtttcatataaggatatggcatcatttgaacgacatcatgaagaaccgttcgattctgagacgaaaattatgagtgtcgtttgtaaggaaaatgaatcattgtataagttttcgaaaggatctgtagaggcgatccttactagatgtaaatggtatcaacataacggtgaaatctatccgttatgtgataaagaaaaagaggtcattttacaacaaaatgaaggttttgcagaacaggcattacgtgtattaggttttgcgtatagtaatgttgagaataatgaccttatttttgttgggttagttggtatgattgatccgccaaaacctgaagtggaagagagtattcgtgaagcgattgaacttggtgtaaaacctgtcatgattactggggatcatccgactacggcaatttctattgcgaagcagaccggtatttggaatcgtgatgatcgtgttttgacaggggtagaaatcgacaatgtaacagatgaacaattaaaagaaattgtaaaaaatacttctgtttttgctcgcgtaacaccggcacataagttacgtatagtagctgcataccaagcggactgtcaaattgtagcgatgactggggatggtgtaaatgatacacctgctataaagaaagcgaacattggtattgcgatggggcaaacaggaacagaagtaacgaaagaagctgccgatcttatattgaaaaaagatcatttcggttccattgtggaaggggtaaaagaaggtagaacgattattggtaatattcgtaaagcggttggatgtttattgacgggaaatttagctgaagtattagtgacaagtgcggcagttattgcgggaatgccgattccgttagtaccaattcaaattttattaatgaatcttattacagatgctttaccagcgatgattttagctgtaaatcctggaaacaaaacgaagcaaacgaaacgtcaagacattgttgataaagagttgtacaaaaaagttgtaacgcgaggaatactgcttggagcagggtcacttgctttattcggtatgagcttagcggctggcgtgcctcttgcggtagcgcaaacatcagcatttgcagcattagttgcaggtcaacttattcaaacattctcttggagacaagaaggatcggacgaaacgatgcgtgattggtcaaaagatcgtttctttgtgacggcgttaggaacgtcttggcttgtattattatcagctatatatgttccgccatttgctcgtatattccataccgctccattaacatttatgcaatgggtacctgttctttttgtagctggtacagtatctcaaatttcaaaacctattattaaattaatctcatataagaatgatgactcgaaaaagttggtagttaatgaactagcattattaaaaacagtgtaaaggagtaatgaaaatgatacgaaaaattgttattggatctactttagcgttagcaagtgccgctttattacctgttgtaagaaatacactccgtccacttgttgaatcaggtgcaaaaggtgtgaagtctacttttgaaacgattaaagaagaagtggaagatattattgtagaagcgaaaatggatagaatgcaaaaacaattcgagaaagaactttcttatgttgaagaagaacattctaatgaacaagagataattgaagcagctgcaaaggttgaggaaaaggaggaagtaagaaatgacgcataaagctgttgaacaagatgtggattaccatttagaaaaagcgttagtacattttgaacaggcgctagacttgagtgtaaaagcggcatctgaaaataaggcgatgcaaaaagagattgctactaaaatgggatcttttacgggagatatctttcaatccgttcgtgaaaaaggaaaagtgaatcgcatgaatataatgaagtggttcactctaccccgtttttaaacagagctgttaagtggaaggaatatagggagttattttctccctatattcatattccatgctatgtatgtcacgttagtttccgggatgttcaacaatacgaaggggtgaacgaaatggcagcatggatgatggtattagcgctaacgttttcatcaagtattgacaacttaggggtagggatttcttatggcattcgaaatataaaaattagtcatctatcaaattttattatttcggtaatttgctttttatttagtgtagtaggaatatattttggcttatggctatcaaaaattttacctgggataatgccggttgtaatcggttcgttcttattagttataatcggtctccgaatcatcttactagcaattcctcggaaggtttcggtgcaagagattgaaggagaagtgggggacactgaaataaatggcttaacgaaaaatatcggtaaatctggggaaatcggttttgtggagtctatttttcttgggattggtttatctgctaatgcgctcacaaatggattaggagcgggtttgttcggtttgaatccaattgctatttgtattgcagctgcagttggtagttttattacagtatggggcggagttgtgttgggaagaaagatagctcacgttcgcatcggtaaattcactttaggtcagtttggtacattgattagtggaacattattattagttattgcctttgctgcattttttgattaattcatagaaggtgagtgaaagtgagattactgtataaaagactgaaatattctgaattagaatcggagttacaattagtagaaagtgttttaagttcggggtattttattttattggatttaatcttcgtatctttcttattaatggtactgaccttttctatgcatcattcattttttatagcaattgtcacattcgtgagttcttacataatttgtggtagtgtatttttattattacggaaatggttaaaatgagttgaaaagctatcttaattttttaagatagcttttttgtttacaaaatgtaaacatataaaggacttctatcttgtaaatagtcgaaaaaatttgttaatatgaattgtatagagattatagttgtttttcttataataactatggttattctcgtgaataaaggggaatgagatatgtctcaagataatgaaaaaagtaatcttggattgttgttgaaaaagttacttaaggaaaagtctttatcgatgcgaaagcttagtttgcttactgaaattgatacggctactatttcaatgattgtaaatggtaagcgaaaggcaaatccgaagcatttgcaaaagttcgcggagagtcttggtgttccagttggtgatttgtttgtggcagcaggctattctattgaaacgaaacaggaggagcaatcggatattcatgtttccattaataacattgaacatttacttgaatccgcacagctctatgatcaaaagtttagtatatcgaatgtagagcagcaattaacgaattatgaacaatattcgcaaacagaagaaggcaaagaaacgattgaaaaggggtttcttgaaaagattcaaaaggtaagcagtattggcccgtttattaatgatttaaaagaattgtatgaaagatttacgaagaagaagggaacgactgcagaacttgctttaatgggaagtgcgctgatctactttatattatcggtcgatgtaattccggattatatatttccaatcggctatttagatgatgcggttgcagtacaactcgttttaaatgcactaatgaaaaggtaagatgtttatatgaatagatagataaggatatttacataccaatagtttgagataattgtatcgttatgaatatacgaaaaaggtgtaccccgtgttagaacggagtacacctttttcgttttaatttgccgattcttctacatactcataagctttctcaccatgcatcgaaatatcaagtcccatgtgttcctcgtgctcatctactcgaacggggaggaaaaagctaataactttaataatggtgtacgtcattatgattgtaaaggcataggttgccccgattgctacaagttgtttaaacagtaacgcggcgtttccgtaaaacaatccgttcgcaccatccccgtttacggcagtagttgcaaatagtcctgttgcaataccgccccaagttcctccgatgccgtggcatccaaaggcatcaagtgtatcgtcatacccgaattttgtttttaagaagaaaacggcgccaaagcataatataccaccaattgctccgataagaagggcggagaaaggtgtaacgaacccgcaagctggtgtaatagcgactagaccagaaacaactccgcaagcagctcccattgcggtcggttttgattggaagaaccattcagaaagcatccaagttagagccgaggcagcggcggctatatttgtattaataaatgcagttaacgctacgtcgtttaaggataatgcgctgccgacgttaaagccgaaccagccaaaccataataaacctgcgcctaacattgtaaatggcaaatggtgaggagaagaaccatttatgttttttcgttttccaaggaaaatagctaatacaagaccagcaactccggaagtgatgtgaacgacgtttccgccagcgaagtctagggcgccaagttcccttagccacccaccgacgccccatacccaatgagcgacaggattgtaaacgattgttgtccatagaaggataaaaataagaaaggcagaaaatcgcattctttcagcaaatgcacctgaaattaaagctggagttaaaatggcgaacatgagttgaaacatcatgaataaattgtgaggaatagtagatgagtagtctggatttggtgcgtaggtaactccgtttagaccgaaccaatcaagtgtaccgataagcccgtgccaatctggtccgaatgataaagaatagccgataacaatccattgaatcgaaacgatagccattgcactataactatgcatcgttgtactgagtacatttttgctgcgaaccatacctccataaaaaagtgccaatcctggtgtcatcaacatgaccattactgtcgccataaacataaaaactgtatctcccatatccatgatctctcctcctataatgttagaaaaaataacatatatttgttatgtttcatatcatattcgaaattaaaccgaaaatcaactaaaaattcagaagattatatatatgatgtaataaaacctaacatgaattattttgtgaggattaaaatcgacatatgcgcttcattcagaaaattggtataatattcttacaattaaagaacttgggggatgcgtgtgggaaaaatacggactaggaaactattcatttgtttttgcttagctgttgttttgtttgtaccaatacatacttttgcagacgaaaaaagagagtggcgagatgaagttatatactccattatgattgatcgcttcaataatggagaaccgaaaaatgacaagcagttagaagttggtaatttagaagggtatcaaggcggggatataagaggaattataaaaaggttggattacataaaagaaatgggttttactaccgttatgctttcgccgctttttgaaagtggaaagtacgatggattagacgtgcaaaattttaaaaaggtaaatgaacatttcgggacagacaatgatgtgaaagaacttgtaaaagaagctcatgcaaaaggaatgaaagttgtatttcaatttccacttggagaaaacgaacgacaggtaattgacgcaatgaaatggtggataaaagaagttgatttagacggaagctatgttatacatagtgaaaaaaagccgcgttccttttgggataacgcgcaaaaagatatgcaagtgataaagaaagattttcgtattatgacaaaggaggatggtgaatacaacgaaaaaatagtagaatcgttttctaaagcagatgtatcggtgaaatcgttatacgatgtgagtaaaaaagaaggagaatttgttacgtttttagatgatcaagaaacaaaaagatatgcgcgtattgcaaaagaaaatatgtattatccgccatcacgtttaaaactggcgcttacttatttgttaacatcacctggaattccgaatttttattacggaactgaaattgcattagatggaggaagtgtacccgataatagacgattaatggattttaagtcagacgaaaaatttatgcagcacataacaaaactaggtgaacttaggcaggcgagaccgtctttacgacgcggtacgtttgagcttctgtatgataagagcgggatgagcatactaaaacgaaaatataaagatgaagtaactttagtagcaattaataatacgaaagaaacacaaaaagtctccttacctgcaagtgcaattggtgaaaaacaagagttaagaggattgttgcaggatgaaattataagagagggaaacggaaaattttatctcgttttaaagcgtgaagaatcaaacgtgtataaagttaacggagaaacaggtgtgaattggttatttatctccttaatcgttggtgtgaatgtattatttattgcgtttttaattgcagttaaaaggaaacgtagatgagaagttgctggctctatgttcatgtcttcttattgtatatgtaagtttgttcggtggcgcgatagtatttattctgttgatatgaaatttcttaagagaaacgatgtgagaatgaaaacgtccctagtgagaggagggccaggttaggaaggggatgttcttcctaacctgttttttgtgttagcaccgatagggaagaatctttgaagcaatcaataattgtaactatattgattttacattacattaaaagttagagaatactcttatactaatacagtgctaaatagtaggtggaaaatggaattttacgatttgggtattaccattaaagagcttagaattaaaaaaatatatcacaatccgaattatgtcatggaatatgttcacaaagtcaaattagctattaatctaaatactttatacttattaggtgaactttactatttaaagggatggaatttattgagatttaaacaacagaatgaagaagatattgcaaataacatgaaaaaagcattatttatatttgaactaacagaaaaagaaaatctgataaaaatggttaaagaaaaatattttgaaaaccaaaatgaaaaaagccactcataattcatttggggattacttgaaatataatagaacctacagggaaaatccctgtaggttctaaacttataaactttcttctaaaatattagtgtttaatataaatttttgaataagagtttacttagtgtactttttattttgaagtctgcatctttattaaccatttatgcttctttttaactccatccaaatataattaaaattaagatggttcaagtcggaggaaggcgctttgaggtgtctttttttatgacttttatcattaactatttaatgttttttaaatgattacatgacatagtttttttgtaccaagctttgttgatacagttagacttatccgttagtgaattcgcattattagaacatcctacagtatttagggagaatgtggccaataaaaaccatagtattaatttcttcatataaccacttctaactcttttttaattaacattttttaagttccttattaattttacaatacattaaaggttgggaaatattcttatactcataaattgttacgttttggcggggggaggaattatgagttacagcgatttttaagatgactttggtctagggtgtagttactaagaaaagtaattcaaatcgaagggggaaacgtcttgaggtgtctttttcttattttcaataaggtctgctaaatacatgtataaaacaaattctacaataaggcctagtttaatcatacggtcacttgtaaagtgtgcgtatggttagaccctgttcacttagcgattttcaccgcatatacctttttctatagtttgttctcgtaatattgtctctacaagacaaaaaagaaaactcctctaattaagaggagttttctttttagcggtagttaatgaactgtacgtcgattggtaaatcagcgctacgaacagctgcgattactgcttgtaagtcatcacggctttttgctgtaacgcgtacttgatcatcttgtacttgtgtttttacttttaatttcatttctttaatgatgttgttaatttttttcgcgttatctttatcgataccttgttgaagtgttgcgcgttggcgaacagtgttgccagttgcagcttcaacttttccgtaatctaagttcttaattggaacgttacgttttacaagtttagagataagaacgtcttttacttgctctaatttaaactcgtcatcagaagttaaaacaagtacttctttttctaatttaatatcacttttacttcctttaaagtcatatcggttctggatttcttttaatgcgatattaattgcgtttgttacttcaggtaattctactttcgaaacgatgtcaaaagaactatcttttgccatagttagcacctccaaataaatttctaatctttttatgtactgtacatactaaagtatagctgaaaacgagtctagacttaagtgttttcgtacttatattcatgtaacctcattttattatagtgaattttgggcagttggacaaatataggaaaaatcatgttataattaacttttgtttggaatgataaaaaagataattttatatatatagaagggaattaaaaaatatgtatttgcaaataggatcgattgaacaggtaactgttttacgcgaaacggaaatcggatatatggttgggaatgaagaagaagaaattttcctacataaaaacgaagtggctggagaaattgaagaaggcgatacgattgatgtattcttataccttgatcaccaaaatcgtatttcagcaacaatgaaggaaccaattattacaacttatgattggaactgggtaaaggttgtagaagttattcctagtttaggtgtgtttgttgatattggtgtgtcaaaagatatactaattccagctgatgagttcccgatttatatgccggtatggccagaagtaggcgacgaattatattgtacgttaaaattaacgaatcgtgatcgtttaattgctcttccggcaagagacagtgatatgcaagaaattatcgtagatgcaacgccatctatgcgtaataaaaacgtaaacggacgtgtatatcgttcacttcaagttggttcattcatactaacggatgagcatttccgtgctttcctacaccatacagaaagaaaagaacaagtccgcatcggtcagcgtgtaacgggccgtattattgacgtaaaagatgacggtacaattaacatttcacttcttcctcgtaaagaagaaggaatggaagatgatgctgcagtaatttatgcatatatggaagaacgaggcggagcaatgccgttttgggataagagccatccagaagatattaaagaacgctttaacatgagtaaagctgcatttaagcgcgcacttggtaagttgatgaaagaagaaaaggtttaccaagaagaaggttggacgtactttaagaaataaggtggatgaaaaaagaactattctttctctgaatttttaagagaagggatagttctttttatttttaataatgtattcgctctataaggtagatattgtgaaagaagtaggcaggatggaaactaaagttatagaagaggtatgttataaagttttaaaaatatatggttaattattatgtagttttttaagtgagattttgattgtagtatttcttatgtgattcattaaaaaggctaaaagaatataagagatttatcgcagtgtttgtactgcctatcctgctatttgccgggcagtaagatcatcactgattaaagtttcattttatgtataaaattgtgatagcttttacactgtgttttgaatttttacaacgctgacagtattaaaaatataaaataattaggatgattatatgcatatttggatactaacaaattggcggaaatattataatctagaagagaagagtcatcgcatgggactacgagtaaaattcgataaagatgttgatcctgaagtgagaagagctattaaagagttttgtaaatggatacgccgagaatatttttttccaattagagtacctatttatgtaaaatcttcatataaaataaaggcgatggatggtgagttggtctatggtactttctttgaaccatttgatcgaaatgatgagccgtatattcgtatttcgacaggagattattacgatgagctagagaaaagagggaaagatgacgctttgggaggatatttgtttactattgcgcatgaactaacacattattttcaatggattaatgatataagactaacgagaattggatatgagaggcaggctactgcttattcaggatatattattgatgagtataaagaaactagagagcatccgtgaaatagaaactttatggataattggaagtatgataattagcaatgggcttgaatgaatgccctaatatttaggggctatccgggattagatatctgagttattaaacaaaaataagtgtgggtaatacgctttgacgaaaaggtgtgtatatgaaattttataacgcagtatatcttataatttcttatgatgatgagatattgaaagagaggtacgaaaatgcaagataatgtactggaacaattgataaagagtctctcggtattatcccttgaaaaagaacacgaaatagcagcagttgatttacatgatatatatgagagcactgaaagattcgaacaattacttgaaaatattatgaactcacaacagtctaaagaagaattaatagatgcgctaattgaagtggagatagaattagatcacatcaattggcattacaaaagcttgaagaaaaagttggaaatattgatgaaagattaaaaagcacaaccttatttaaaaaaataaggttgtgcttttttaatttccttgcggagaaacaagagtaaatgtatctttcaaatcactatcatttattttaatatttgccttttttaattcctcttgtaacaattttttgctgaatacaggatcagcagtacgttcttcctctaagtttttgcgaatagagttttttacctcatcgtaaggttttaaatcttttttatcagttaatttaataacgtgataaccgtttgatgattttacgggattgctaatttgtccaacatttagtttgtaggcagccctttcgaattcaggagccattgtacctgaattgaagtatccaaggtctccgcctttatcttttgatagtagatcttgtgattcttgttttgctaattcttcaaatgaagcaccagcatctagtttactctttatttctttcgcttcattttcgtcacttactaaaatgtgactcgctttaatttctggcttatagtggtcttttacgtctttctctgtaatgcttttcttaatcgcttcattcatagcaagtttgaacttaatttgatttttgaaatcctcttcatcttttaaaccattattttctaatacttttttgaattgatctccatattgtttttttactttttctacttctttatttacctcttcatcagatactttatatttttttgtgatgacgtcttgtgccatcatttcgtatagcatgtcttttccgtaacgatctttcaattgtttttcgaagttatcctttgtaatggtcgagtctgttgctgtagcgactgtagctgagccgtttttttgtccgcaagcagataacatcaatatacttattagtgcagtaataatgaaaatatgtttccctctcatgccaacacctcatccgaatatgttatcgctattgtagaatatagaagtgaacatgaagtgaatttttaatgtttttttcctttaaaatgtaaaaaagtacatcaacataattgttgatgtacgatggaatcaaaggtgatcggtctttttagagtatgcacgtttaccttgctgaatatttttttgctcttgctcatttttttgctcttgctcatttttttgtgtgcgttttgcgttattatcgcgtgcttttttgtcgttatcactcgtatgtggcatatgtatcaactccatttctaaacgttgtacgtttatcatttcctttttcgtaaagactatgtatagcggtgcatttatgaagggtaaaggtggattcgaaatggatttgaagttgaattatactgaacttataaagaagttaatcgttgtaatcatcgcaggtttattaaacgcgattgggatgaatttatttttaacgccagcaaaagtgtatgcgagcggctttgctggattgtctcaattattatcacaaatattaggtgattttttatcgattcacatatctacgggagtattgtttagcttatttaatattcctgtcgttattttagcgtggaaaaaggttggaaaggccttcaccttttttagttttctttgtgttatatttatgactctgtttctagaaatcatccctgttagagcggtttcgaatgatatcatattaaatgcgatttttggcgggattatttcggcaattggagtagggattgctttaaagtggggtgcttctacaggtggattagatattatcgccatgattttatcaaaaataaaagataagcctgtcggtacatactttttcttttttaatgcaattatcattatcgctgctggctatgtatatggatgggaaaaagcgttgtatacgctagtgactttatatgtatcaacgagaattattgatgcaattcatactcgtcatgtaaagattacagcattaattgttacgaagaatggggcagacgtaagaaaggcgattcactcgcgattagtaagagggattacaacgataccagcaacaggtgcttatacgaatgaaaataaagaaatgttaatgatggttattacccgttacgagttatacgaattagagaggattattagacaagtggacccaggtgcatttacaaatatactgcaaacagttggggtgttcggattgtttcggaaagattaaagaggaccaaagttggtcctcttttttaatgtaaattcgtaatgttttgcaattgctcttgcatttcacggagctgaactttttcagcagttgaagagtttgcgtaagcggattgcaaagcattttttgctctatacacgagatcttgttgctcagtaccgcttgaacaagatacggcattttcaacagcatctctagcttgttggaatagtaagttccccatttaaacccctccaaaagaagagttacttcttgctttttctgcctcagctaatgtacctctgtacgggaatcttgcatcatgcttcataacagcatcggctccttgttggataaaacgttttgatttgttctttttacccattcgaaaaaccccctttatttagctgaaaacaatcgacgcaatgtctcatgcgtctacttatagtatggacatttggcaggaaactataagtagggaatttttagattacaacccaagaacctcttctaaatataaagcaataccatcttcttcgttcgttaacgtcgtatggtttgcgagtgattttaattcagggatggcatttcccattgcgatgccatgaccagcaaattcaatcatttcaaaatcattatcttcatcaccgaaagcgataatgcgctcttgtggaatgttgtaatgactagaaattttttgtaatccaactgctttatttaatccgcttttcacaatttcaataatcggccaaggtgcgccccattttctatggtcgattacttccgcatgcatatccgttaaatgttgacgaattgcagtagaatgctcgtcatgtgcgtcaattaataagcaagttggatgatcgtttaaaatatttaataagtctccggtaaaaatcttaggagagccgaattcgaaaatatgttttttatcttcatcaatttcacgaacatacacatcgtccattacttccgcgtatatattttttacgccaaaatcaaagcaagctcggacaatttcttgcgctgttgctagctcaagaggagagtgatgtgttccccagtttgaatcaagaggatgatgtacgtaagcgccgttaaagtttacgataggtgtgttaagatcaagttctttatagtaatcgtaactagcacggaatggacgtcctgttgaaataacaacaatatgtccctgttcctttgcttttgcaattgtatgtttcgttcgagtggaaattattttgttgtctgttaataaagtgccgtctaagtctaatgcgattaaatgttgtttgttcataatttcacctcttataataatttttttgtatctatctgtatttccgtttttaatatgcagaaataagaggttaggctcggtgaaatcaccatagatggaaatttcactatatatccatcttacgtctcaaagtgctgtggtgtctactatttatcgttggaaattaagaaaagtcaacatctttttagaaagttcaaacaatgtttctttcattatgtacaaattgtgaaaagggttacattgctcgtgtggtgaggcatataatgaacatgtaatcttctcgtatatgtttgactctcctttgaaactagcctagagtaggttggtttctttttttttctacaagtaggaaagaaatccctgcttacgcttgtgtcattcatatatatgtacaagaatgagatgtagtactgtttcctaaacatgacagaaaagctttcttttaaaatggatatactaatgaggcaagacgtcatggaaggagaatgaagatgggacaaaatcgcaggtttcgttctggacaaaaagcgccgaatgatggcatttacgtagaaattggtgaaacgggaagtatggtgaaagatccgcaaatggtgaaattaactgccggtgaaaagtttccggataacacgaatcataaccgccagtggacatataaaagaaaaccgtaacagaagccgcaatcattattgcggcttttttgtcgttacacattgtaatttcatttaccgtattttttagcagtataatgaatgctctctttttctttttcaaataataagtttgaaaatacataggcaaaattattgtataaaaaagtcagttggcgtataatcaaatcaaaggtcaaagaaagtcaaacttttggagggctgtaaagatggacttaaatcaaatgacaacaaaaacacaagaggcgattatgagtgcccaatctttagcggtatctcatcatcaccaagaggtggatactgttcatctattacttgcattattagaagagcaagatggattagcagtacgtatatttcaaaaaatgaatgttgatatagaagcattaaagcaaggtgctgaaagtttaattaaaaagaaaccttctgtaacggggagcggtgcagaagttggaaaattgtatgtaacgagcgctctgcaacaactgcttgtaagagcagggaaagaagcagaaaaactgcaggatgattacatttcagtagaacatgtgttgcttgctttttctgaagaaaaaggcgatataaatcaattatttacaagattgcatattacgaaagataacttattacagtctttaatgacagttcgggggaatcaaagagtgacgagtcaaaatccagaagcaacttatgaagcgttagaaaaatatggtcgtgatttagtggcggaagtgagagcagggaaaatcgatcctgtaatcggccgtgatagtgaaatacgacgtgtaatccgtattctttcacgtaaaacgaaaaacaatccggttttaattggggagccaggtgttggtaaaacagcaatcgttgaagggctagcccagcgtattgtgaaaaaggatgtacctgaaggattgaaagatagaacgatttttgcgttagatatgagtgcactcgtagctggtgcgaaattccgtggtgagttcgaagagcgtctgcaagctgtattaaatgaaattaaaaagagtgaaggacgcattttattattcattgatgaacttcatacaatagttggagctggtaaaacagaaggagccatggatgcaggaaatatgttaaaaccgatgcttgcgcgtggtgaactgcattgtatcggggcgacgacgctcgatgaatatcgcaaatatattgagaaagatccagcgctagaaagacgtttccaacaagtattagcagaagaaccaactgttgaagatacaatttcaattttacgtggattaaaagaacgctttgaaatttatcacggtgtaaatattcatgaccgtgcgattgtagcagcgtcagttttatcagatcgatatatttcagatcgattcttacctgataaagcaattgaccttgttgatgaagcgtgtgcaacaattcgtacagaaatcgattctatgccaacagaattagatgaagtaacgcgccgcattatgcagctggaaattgaagaagcggctcttggaaaagaaacggatcgtggtagccaagagcgtctaaaaacattgcaacgtgaattatcggatttaaaagaagttgcaagtggtatgagagcaaagtgggagaaagaaaaagaagacattcacaaagttcgtgacttacgtgaacatttagaacgtctgcgtcgtgaattagaagaagcagaaggtaattacgatttaaataaagcagccgaacttcgtcacgggaaaattccagcaattgaaaaagagttaaaagaagcggaagaaatgggcgcgcataataaacaagaaaatcgtttattacgtgaggaagtaagtgaagaagaaattgcagatattgtttcacgctggacgggtattcctgttgcgaaactcgtggaaggtgaacgcgagaaattattacgcttagagcaaatcttatcagagcgtgtcatcggacaagaggaagcagtaagcttagtgtcagacgcagttcttcgtgctcgcgctggtattaaagatccgaaccgcccgattggttctttcatcttcttaggaccaacaggtgttggtaaaacagaacttgcaaaaacgttagcgcagtctttattcgatagtgaagagcaaatgattcgcattgacatgtctgagtatatggagaaacacgcagtgtcacgcttaattggtgcacctcctggatatgtaggatatgaggaaggtggtcaattaacagaagcggtaagacgtaaaccatattccgttgttttattagatgaaattgaaaaagcacatccagaagtattcaacattttattacaaatgttagatgatgggcgcattacagattcgcaaggtcgtacagtggactttaaaaatacagttattattatgacttcaaatattggatctgctcatttactagatggattagaagaagatggttcgattaaagaggaatcaagagatcttgtaatgggacaattaagaggacatttccgccctgaatttttaaaccgtgttgatgaaattattttattcaaacctcttacaacgaatgaaattaaaggcattgttgataaaattgtaaaagaactacaaggtcgtctagctgaccgtcacattacagtagaattaacagatgcagcaaaagaatttgttgtagaagctggtttcgacccaatgtacggagctcgtccattaaaacgatacgtacagcgtcaagtggaaacgaaattagcacgagaattaattgcaggaacaattactgacaatagtcacgtagttgttgatgtagaaaataacgaattagtcgttcatgtgaaataaaaataaaaaagagttcggataaaatccggactctttttttagtgttgttctactggctcgtttggaattgcagctgaaattgctagtactaacacagcaagaacaactgagaaaatagacgcttggttaaagtcgtatgtaccgccagtcatagagccgattacatagctcatcatatgtacaagtaagaacgaccaaattaatgcccaaatgaaacgcatattttacacctctattcgttcaatctgtccttattgtaacacaattgaaaaaagaatatagaaaaatatttgtagatttttcaacgcaaatttgcattccgttcatacattataaaagagtacttttatatgtttagaaaataaggcgggggaaaaatgagtattacggaacgttttttttacttagaaaaagaaccatgtgtcatttatttaccggagaagccaaatggattttctgttatgctcctcggtgattataactactttattgagaatggtacaagtttatggacacaacatgcgggtaaatcttattttttacatggtcttattgaacaaggctacacggtcttttcctctaatttatacggaagacattggggaaacgatcaatctgttcgtctggcaaaacgtttatatgatgttgttttgagaaaagagacgttaaatgcgaaaatgcacattatggcagatggtatgggagcgcttgtagcacttgaaatgatgaacaaatatcctgaatgtattcgttctgttgttatgctaaatccgtgtttagatttaccagaatatgtaagttttgagaaagagcataaatttttttacaagagactcgtgaaggaattaagtttggcgtatgatgccaaagaagaagaattagaatcaaaaataaataagaaatcatttacgcttcttccatcttgtgtacctgttaaaattttcgtatcaacacaagaaaaaagaggaagaaaacagcagttgcgtagatatgagaaaatgaggcaactaaatcaatgtgatacttctgtcttgttccatctgcaagatgtgaaatataaaatggttaggcaaacgactgatttctttaaaaaatatgaagaagaattatgaagctcccatatacataaatgaggagctatttgtttcagagggaaaggattggtggtatggaacgcgtgctgataataggtgcacttacgtttgtaggttatcaccttgtaaataaaatgattgcagaagaagtggaagtctatggtcttgattttgatgaattcgatagtatgaccaaaattaatgaagagaagttattattaattgggcgaaatgcgttatttacgtattattcgataagagatgaagatggatggagatcggttgaggaagagagattcgatactgtttatttttgcttatatgagccaaatcagcaaagtggatttcggaatgaaagagtcatattacaatatttaaagcgaattataagaatgtgtgaagaacaaaaagtgaagttaaatttaatttcttctattgaagtaggcagtacagatgaatccgaaaataagcgcctatttttgaaagtagaagaaggattgaaaaaagggaatttacaatatagtgtatttcgagttccaacattatatggaccgtggcaaccgtcctttatgatgtttcatcagcttattttatcagaattagttgaaaaagagtgccgttgtacgattgaggaaaaggggaatgatttactttacgttgaagatgtatgtgaatacttatgggaacatggaacgaacggggcgcatcttggtatatacaatttacttagtggtaaacagtcattatgggaaaaaggtatgaatcttttacgcgcggatgataaagtaaataaaaataacagcgaagtaagagatgaggctatcgaagtaatttcgataaaaagaaatactccgttagaatacggtttaaataagcaactggcacacatgaaaaaatataaagagttatacgaagggtagtacgcgtgttacactattgtatgtgaaagttttaatggagaggaagagtataatatgaacgaaaaaagcatgcagtttttacaaatcgcaatgaagcatttaccggaagcaaaggcaattttagatgataatggaattgcacttgatatggagaaggcacagccggtgttagagttgttaatgaaagttatgaacgaagcttacgagcttgggaaagcagataaagaataaaaagcatctttttaagatggaagagaggcccgaaccgtggatagaagcggtcagggccttttttattctcgcctgggggaaaaccagagatatgaagaggataaaggaaaagtagtgaggagaactgtctagtttagaaggaaagcagataaagaataaaaagcatctttttaaggtggaagagaggctcgaaccgtggatagaagcggtcagggccttttttattctcgcctgggggaaaaccagagatatgaagaggataaaggaaaagtagtgaggagaactgtctagtttagaaggaaagcagataaagaataaaaagcatctttttaaggtggaagagaggctcgaaccgtggatagaagcggtcagggccttttttattctcgcctgggggaaaaccagagatatgaagaggataaaggaaaggtagtgaggagaactctctagtttagaagaaaagcagataaagaataaaaaacatctttttagatggaagagaggctcgaaccgtgaacagaagggtttgagtctttttatatttgagaggtatgtttctgtttcttttaatgaaaaataaagtggataatgcgttagctttctgttttatgcgaaatatattctagacaaaaatacatttatgttttaaaattagtaccaagtcataataattgatataaaacggagggctgcgatgtgaacgtgggcattttagggatcggaagatatgtgccagaaaaagtagtcacaaatcacgatttagaaaaaataatggatacatccgatgaatggattcgtacgagaacgggaattgcagaaagacgcattgccgatgatacaatagatacttcatatatggccgtagaggctgcaaaaaaagcacttgaagatgcaggggttagcggagaagatatcgatcttattttagtggcgacagtaacaccagatcgtgcgtttccagcagtagcttgtgtcattcaagaagcgattggagcgaaacatgcagctgcaatggatgtaggtgcagcatgcgctggttttatgtacggaatgattacagcgcagcaatttattcaaacggggacttataaaaacgtattagtagttggtagtgataagctatctaaaattgtagactggaatgatcgaaatacagcggtattatttggagacggagccggtgctatcgtaatgggagcagtttcagaaggaagaggcgttctatctttcgaattaggagcagacggaagcggcggtaagcatctatatcaagacgagtatgttatgatgaatggcagagaagtctttaaatttgccgttcgtcaacttggtgaatcttgtcttcgcgtgctggataaggctggtcttacaaaagaggatgtggatttcttagtaccgcatcaagcgaatattcgtattatggaatctgcaagagagagattaaatttaccacaagaaaaaatgagtatgacaattgaaaagtttggtaatacatcagcttcttcaattccaattgcaatggtagaggaattgcaaaatggacgtattcaagatggtgatttaattatacttgttggttttggtggcggattaacatggggagcagtcgctcttcgttggggtaaataaggactgagagaaaaaaaggagtgtattttgtatggaaaaaaagagggtcgtaattacaggactaggagctgttacaccggtcggaacagatgttgaaacagcatgggaaaacattaaaaagggtgtatctggaatcggacgacttacaagaattgatccggaactatttccagcaaaagtagcagcagaaattaacgactttgaagtcgagaaatatattgataaaaaagaagcgcgccgtatggaccgctttacacaatatgcagtagcagcagcgaaaatggcagttgcagatgcaaagcttgaaattacagaagaaaacggacctcgaattggtgtatggattggatcaggtattggcggtatggaaacatacgaagaacaatttaagatttttactgagaaaggcccacgccgcgtgagcccattcttcgtaccgatgatgattccggatatggcagcaggtcaagtatcaatcgcaacaggagcaaaaggaattaacacttgttctgtaacggcttgtgcatctggtgcaaactcaattggtgatgcatttaaagcaattcagcgtggtgatgctgatgcaatgattacaggcggagcagaagcaccgctaacaagtatggcattcgcaggatttagctcagcgaaagcattaacatttaatgaagacccagcaacggcttgccgtccatttgataaaaaccgtagcggttttgtaatgggtgaaggctcaggtattctaattcttgaagaattagagcacgcattagcgcgtggtgctcacatttacgcggaaattgctggttatggtgcaactggagatgcgttccatattacaatgcctgctcctggtggtgaaggcggagtgcgtgcaatgcgtcaagctttagctgatgcaggcctacagccagaagatattgattacattaatgcgcatggtacaagtacggatgcgaatgaaaaatatgaaacgatggcaattaaagaaactttcggtgagcacgcgtataaagtagcgattagctcaacgaaatcaatgacaggtcacttattaggagcagctggtgctgttgaagcgattttctctattaaatcaattacagacggagtaattccgccaacaattaactatgagacaccagatccagaatgtgacttagattacgtaccgaatcaagcgagacaccaagaagtaaatgcagtattaagtaactcattaggatttggtggtcataacgcagtgttagtatttaaatcgtataaataatagatgaaataaggagttttttcgcaatatattgcgaaaaaactccttatttatttttacgcctttttctcctgtagcatatacataagaaaaaggagggataaagatggggattgttgaaacagctgaatggctacatttatattatgggcggccagaaaaactttgtgagaaatttacgaagtatattccgttgccaaaagaaaggttgtatcgctttttaatttcaaaagggatgtatcgcccgattatgcgcggagaaaaggaaattaaagaattagaggaaaaggaaatttggaaagaattgagcctggagtatgataaactgaaaaactggttaaaaggtccagatgtccctgtctttattttattatcagattcctataatcgaactgtacaagaagagtataacggtagggctggattatctatgcgtcatgttattttcttattcgtatgtggacggaattcggtagaagaattaaaagtgttattagcgcatgaatatcatcacatatgcaggttacatcaaattgagacgaaagaaacagaatatacattacttgatacgatgattatggaagggctagctgaacaagcagtaacagaaaggtatacagaaaaaaacaatgcaccgtggacggcgtatctttcaaaggaagaggctatttattattggaaaaatattgtacatgaaagaataagtataaaacgaggaacaagggaacatgacatcttattaaatggctttcactcttatccgaagatgcttggctatgcgcttggatttcatattgtcaaagattgtgtaactttggaaggagaagatacactttctttattatctatagatgcaaaagaaatattgaataaagcaagtacatttcatatataaaaaaacaggagttctatttcctgtttttttagtattaatagaagaaaaaataataattagaatatatttcctcaagtggaataaagttaagcaaaaatgaacataatgattggtacaaacagtagtgaagtgaggggtagtgaatgttatatctacatgatgtatgggtaaattggtttgaaggtgaagaaaatgggtataacgtttgtcatttttacgaatggcggaaagatgatacgattgagctattagatcaagtgccattattaaaagtagatgccacattatatcattacatcgagaacgaattgttagagcttccgcaaaaaatgctggaagacgtacatcataaggcttatattcgtaaaaatcatgaacgtttgcagcaagagtattgctttgttgttacagatggaaaaggaattattgcgattgacacaattggttacaatgtaccaattcgcaaaagcagacttataccacgccaagagcagatggtatatgagatggtagaaaacgtacaagcagaaaagtatgagttccaagtagaagaaacagaaaaagaacatcacattttatcaccatcgcctttcattatgaatggcttgactcgtaaagaaagacagctaaaacaattattatttatggcgttagatcaattacatacaacgaaaaatacagcagaaattcgctattggttcacagagtgggatccatcagcatatggaatggttcaacatatggaatttgaagatatttgggttaagctgtatgatgaagcgaaaacaggctggtctgataagcatgaacaattatgcgagcgtctcgtaaaaggacagccattttttgaaaagttatgggaaatggaaaatgagcaaaaggtaaattaaaaaaccgccaattggcggttttttaattttgtagtaatccagctccagcggcaagaatgttcggtggcttcgcgccttcctgcgaggcaaaaagcgcctctacgtcaggagctccatccccctcacattctaaacgagccgcctccaccttatatgtaatccagctccagcggcaagctcttcgtgtctaagaaccttccgcataagaaggaaaaaagctccttttatgcgaaagaaccttagccagtcagagctgaacgagccgcttccactttatatgttacctacgttttctgcttagtcccattgcgttttctactttgcgtagttgtttgaatgcaacgcggtttgctttttctgcacctttgtctagaatttcgtctagttctggtgagttgattagttcgttatatttgtcttggattggacgaattgcttctacgactacttgcgctaggtcgcctttgaagtcgccgtatccttttccttcgtacattgcttcaatttcttcaactgtttttccagagaatgaagagtagattgttaataagttagagataccaggtttgttttctttatcaaatttcacaataccttcagagtcagtaacagcactcttaattttcttttcaattgtttttggttcatcaagcatactgatcattgattttggattcggatcagatttactcattttcttcgtaggttctgttaatgacataacgcgagcgcctacttttggaatacgaatttcaggaattgtgaacacttcacggaagcgtttgttgaaacgctctgctaggtcgcgtgttaattccatatgttgcttttggtcatcaccaactggtacgatttcagtgttgtaaagtaaaatatcagcagccattaatggtggatacgtaagtaatccagctggaactgaatctctacccgaagctttatctttatattgcgtcatacgttctaattctccaacgtaagcaacagattgcatgatccatcctaattgagcgtgtgctggtacttctgattgtacaaataaagtagctttttcaggatcgatgccgcatgctacataaagtgcagcaagactgcggatgtttttacgaagtccgacgggatcttgaggtactgtaatcgcatgttggtttacaatacagaaataacagtcgtgttcattttgaagctctgtaaactgcttcattgcgcctaaatagtttccaagtgtaatcgttccacttggctgaataccagaaaagataactgacataagtaattcctcctaaaattgaatgcgtgatggggggggagagaaggcaaacaaaaaagcccattcatcccaaaaactatagggacgaatggaccgcggtaccaccctaattatttcactactgtgaaatctctctaatccataataacgttaggatataacgccaaagcctactactttcggttcggtttggtgctcaaaagcccattccatactgtacaattacttgttcacaccaaccacaagctctctgaaattgcctcaatatgtactcttctttatcatcgcatacatataaatttatttattgttacttgagctcttttaatatgaaagaactaaagttttataacaaaatgttttgctgattattatatcatatgggatagtgtttgcaaactacatcaaaatagtaaagctaataagggtcgagaacaacccaaggaagatacctgtaatacaaattggatatgtccatttgaatgaatatgttttataaatacgttctttcttatctgtaggttcctcgacttcttcaattaaagagtcaatctttttgttcgtaccaaatactctttggaatgcgtaaatggttacattgaaaaaaccattttgaaatatgtataaaaaaccgccgataagaataaaaaacagtgcaatataaaacaaaatgttgacaaagttcaacaaaaattgagatgaaatgaggaatgcgccaatactagaagcaatcatcgctataaaaattagtatacaagtatgaaaaaaaactttattcaaaatattcccctccgtcaaaatattactagaattattatactataaaagctataataagtactaggattaattttttgaaaattatacgcaattaaaggtctgattttaagatgatggtagcaatgttaatgtatccctttacgaaaaatttaaaatataaatattttattaaaaattttaacaaaaaaacaaaaaactatattcacaattgttatattatatgtataatgaaaattgtagaaacttggagattattctttcaattctactttttaacaagtgagggtacaggaagtgcaattaggggaggcaacacaacatgaagaaaaagataccgttattacttgcatcaactttaactgcaagtatgttgcttagcgcgtgtagctaccaaaaagatgacgcaaaagcaaaagggaaagagaacgctacgagtagtagtaacggaaaacagattcttaatttaacagagttatctgaaattccgtcaatggatgcatcattagcatctgattcttcatcttctacagcattaaataatacgatggaaggtttatatcgtattggcaaagaccaaaagagaatgcctggagttgcagaagatgtcgaaaagctagatgatgggaagaaatacatatttaaattaagaagagatgcgaaatggtcgaatggggaacctgtaacagctaaagactttgtgtattcatggaaaagagcagtaaatccagatacaaaagcaacgtattcatacattatgttcgatattaaaaatgcagagaaaattcataaaaaagaattacctgctgaccaattaggtgtaaaagcgattgatgattatacattagaagtagaattagacaatcccgttccttactttatcgatttaacagtttatccagtattttacccactaaatgaaaactttgtaaaagcacaaggtgataaatttggtttagaggcaaatacaacattatataacggtccattcgttatgagtgattggaaacatgaacaaagtttccaattcaagaagaatccttcatattgggataataaaacggttaaaatcgaagaaatcaactttaatattgtaaaaaatacagcaactgatgtaaatttatatgagacaaacgcgattgatcgggcggctttaacgtctgaatttgttgataagtttagaaaaagcccagagttccaaacaagaaaagaggcaggggttgcttacttaagatttaatcaaagtaatcagtacttaagtaataaaaacttaagaaaagcaatttcaatgtcctttgaccgtgataacattgcaaaagttattttaaataacggcgcaattggagcttacggatttgttggaaaagatttcgctgaaggtccaaataaaaaagatttccgagctgaaaatggaaagctagttgaaacaaatccaaaagaagcaaaaaagctttgggaaacagcgaagaaagagcttggaactgataaaatcgaactagaattcttaaactttgataatgaagatgctaaaaaagttggggaattcttaaaaggtgagatggaaaagaacttaccaggtttatcaattaaaattaaacagcaaccattcgcacaaaaaaataaattagaagattctcagcaatatgatattgcgtttggtatttggggaccagatttcccagatccaatctcatatttagatatgtttgttacgaatggttctcaaaataaaacagggtattctaatcagaaatatgatgagttaatcctaaaagctaaaacagatacaaaagatttacaagctcgctgggacaaccttctagaagtagagaagatgttaattaaagaggatgcagttatcactccaatcttccaaaaaggttcagcgtatgtagtaaaaggtgccgtaaaagatattatcccaattaactatggtggtaaattaacttacaaatgggcatctgttgaacaaaaataatcttttttttccatcgtttacaagggtatatgcctatgatgggcatatgctcttattttaaaaaaataaaagtaagaatattttaaactatcttattgcttttgagaaaaacggggaggtgcttgactatgggacgttatgtattaaaacgtttcgtgtacatggctttgacattatttttaattactacaatgactttctttttgatgaaattacttccgggttctccgcttaaaaaccaggagaagctatcaccggcacaaaaagaaatcattcttgaaaaatacggattgaatgatccggtaccagttcaatatgcacgttacttaggtaacttagcaaaaggtgatttaggggtatcattccaatatgataaccgcccggtaacagacatgattgtggatcgtattggaccatcagcccaattaggtttacaagcgattatattaggaacatttatcggtttaattttaggtattgttgccgcacttcgtaataatacgtgggtagattatagtgcaacagttatttcggtactcggaatgtcggtaccatcattcgtattcgccgcattactgcaatatttcgtaggggtaaaactaggctggttcccagtagcattctggaaaggaccagagtttactgtaatgcctacaattgcattatcgatgggagttatcgcgacaatcgcacgtttctctcgtgcagaattaattgaagttatgcaagccgattacattttaacagcgaaagcgaaaggaattagccaaggcgttatcattgtcaaacatgcacttcgtaacgcgttaattccagttgtaacaattttaggaccaatggttgcggcattaattacaggaacacttgttatcgagcaaatttatgctgtaccaggacttggggaacaattcgttaaatcgattactttaaatgactatacagttattatgggaactacgattttctatagtgcgatcttcattttagttattttcattgtcgatattttatacggaattattgatcctcgtattcgtttagcgggagggaaaaaatgatgaaagatgtacaaaaattatctccagatttatttcaacaagccaatcaaaataatgttgataatgaagtcattgcccgtccaagcttaacgttttggcaagatgtaagaagacgtttattccaacataaaggtgcgatgcttggccttgtattgttagttatcattgcgctattagcgatttttggaccgatggtaagtaaacactcgtataaagagcaagatttaggtcgtgcgaaattaccaccaaaaattccagttattgaaaatgttcattggttaccatttgacggtacagatcaatatggtgttgaccaatatgaaaaacgtgatattaaagagtacttctggtttggtacagatgaccttggccgtgacttatggacaagaacatgggaaggtacacgcgtatcattatatatcgctcttttagcggcagcaattgacttagtaattggggttgcatacggaggtatttcagcattctacggcggtagagtagataacattatgcaacgtattatggagattattaacggtattccatacttaatcatcgttattttaatggtaatcattatgggatctggtatttggtcaattacacttgcgatggcgattacaggttggatagggatgtcgcgtattgttcgtggacaaatcttaaagttaaaaaaccaagaatatgtattagcatctcgtacattaggtgcaacaaatacacaattaattgtgaaacatttaattccaaacgtaatgggacctattatcgtaatgacgatgtttacaattccatcagcggtgtttggtgaagcgttcttaagtttcatcggtttaggaattcagccaccatttgcgtcactaggttctcttgtaaatgatggttataaatctattcaaacgtatccgcatatgatgttcatccctgcggttgtcatcagtatattaattttagcgtttaacttaatggcagacggattacgcgacgcgttagatccaaaaatgcgtaagtaaaagaggggagaggcaaagatgaaaacattgttagaggtaaaagatttacaagtctcctttgatacacatgcaggtgaagtacaagctgtacgcggcgttacttttgatttgaaaaaaggagaaacattggcgattgtaggagaatctggttcagggaaatcagttacttctaaagcgttaatgggattaattccgaatcctcctggacgcattaaaaatggtgaaatcgtatttgaaggtcgtgacttaacaaaattaacagaaaaagaaatgcagcaagtacgcggtaaagatattgcgatgattttccaagatccaatgacatcattaaacccaacgatgacaattggaaatcaaattatggaaggtctaattaaacaccaagggatgagtaaagcagatgcacgtaaagttgctttagagttaattgaccttgtaggtattccaaatccagaagctcgtttaaaacaatatcctcaccaattctcaggtggtatgagacagcgtgtagttattgcgatggcgttagcttgtaacccgaaattattaattgccgatgagccgacaacagcgctagacgttacgattcaggcgcaaattttagaacttatgaaagacattcagcaaaaaacagaagcagcaatcattttcattacgcatgacttaggtgtagtagcaaacgttgcggaccgagtggcagttatgtacgctggtaaagttgttgaaattggaactgtagatgaaattttctacaatccgaaacatccatatacttggggtttaatcgcatctatgccaagtttagatggttcagaagaagagttatatgcaatccctggaacacctccggatttattgaagccgccaaagggagatgcttttgcaccacgtaacccacaggcactgaaaattgattttgaaatggacccacctttatttaaagtaagtgatacgcactatgcggcaacttggttacttcacgagcaagctccagaagtaaaaccgccggcagtcgttgaaaaacgcattcttcaaatgaaagcaggtgaacaacatgactaaacaacgtgagaaattaattgaagtaaaaaatgtaaagcagcacttcgacgtgagtggtggtgttgtcaaagcggttaatgatatttcatttgatatttaccgcggagaaacatttggtcttgtaggagaatcaggttgtggtaaatcgacaactggaagaacgattattcgtttatatgatgcaactgctggtgaagtgttattcgatggtgaaaatgtacatggtaaaaaatcacgcgcagagctgaagaaattcaaccgtaaaatgcaaatgattttccaagatccatatgcatcattaaaccctcgtatgacagtaggggatattattgcagaaggtatcgatattcacggactagcgaaaagtaaaaaagagcgcatggaccgtgttcatgaactattaaacacagttggtttaaataaagagcacgcaaaccgtttcccacacgaattctcaggtggacaacgtcagcgtatcggtatcgctcgagcgcttgctgtagacccagaatttatcattgccgatgagccgatctcagcacttgacgtatcgattcaggcgcaagttgtaaacttactgaaaaagctacaaaaagaaaaaggtttaacatacttattcatcgcccatgatttatcaatggtaaaatacattagtgaccgtattggtgtaatgtaccgtggccaaatcgttgagttaacaacaagtgatgaattatatgcgaatccaattcatccatatacgaaatcactattatcagcgattccacttccagatccagattatgagcgcaatcgtaaacgtatcgtatatgatccatcacagcataattatggtagtgaagcaccaacaatgcgtgaaattcgcccaggacatttcgtactatgttcggaagcggagtacaagaaatataaagagatttatcaataagaaaaagagccattcttctgttatggaaggatggctcttttctactatataaaagaattgtatacatttgtcggtcagtcgatatatttaaagaatcgccgatataaatctcatgtatcattagtgatatccatatgcaaaattactgaacttgaacagaaacattctcctcttgttcttcaggtttaacaagtgcataacgctcccatgctctacttttccagcggaagaacataataatggcacgtgtccattcgtcgatggcgattgctagccaaataccaacgagccccatatctaaatgaaaggcgaaaaagtaacctagtggtaaactcattaacaccatagagaatgcaccgattaaaacaggatattttgcatcaccagctgcacgaagcgaattaatgatgacgatgttcatcgtacgtcccgtttcaagtagtacacttagtaaaagaacacttgcgcctaacccgataatgtgcggattatctgtaaacagtcccattaattgtgtacggaatgtaataacgagagcgaccatacataaagttacaccaattgcccattttacacttttccacaagcgttcgtatgcttcatctttttcgccaccaccaacgaggcggccaataataatggctgttcccataccaattgcaattgcaaataaataagtgaacatggaaatgttagtagcgtattgtctagcagctaatgattccgttcctaagtacgttgcgtaataaaggaagacgatttgacaagcttgatacatcacttgttcaaatgcagatggaatgccaatttttaaaattttcccaatgtattctttggataaagtgaagtaatattgtaatttcacacgatattccataacgcggtatagtaaccagaagaaaacaataagtgcgatcaatcgactgatagcggaagaaattgcagccccttgtacaccgagctcagggaaaccaaatttcccgaaaatgagtacgtagtttccaacgatatgaatcatattcattccgagtgaaataaacatcgcttgctttgtaaaaccgtgtacacggataattgcggctaatgagttaataatagcttgtaggaagatggctcctccgacgatagataagtagttttgcgcatacgttagtacatcgccttgtaagttcattgcgagcatcatatgtttcgaaaataaaagaaaaccagcgcttataacgagcccaactattaaatttaatgtgacggctaatgctgatattttagatgcttccataaagcgtttggaaccgaggtattgagatacaacgatagcagcgccgttcccgatgacttctaataccaaaatcgcaatatgaagatattgattcgctgcaccaaccccagatacagcatcgtctgataatgcacttaacatgaaagtatcagcgatccccattaacataaaaagaaaaacttctagaaaaataggccatgttaataagaataaacttaatttctcagtaggcccgttttttgcctgaattgctgccatgtccgtcccctctttaccgatatctatttttagcaaaatgtatcgtaacatactttcttaacctttgcactcattttagcctacatatttttattatgaagagagtgctattttatgataaaaacaaaaggataattatacataaaatattatgagatataaaattcgtttttctctgataatttagaaaagtgtaaaaaaatattatttttaacactttagtatgaataatcagcaatatgaaacgtttacaaaggtatattttttaacggaaaattttaatgaaatagaaatataaatatacaaaaaatatatttgtgtgtataatatgaattattagaacatatatatatttctttttgtttgaaaatgaaagggttaacatttttttggagggtggaagtatgaaaaaaaagataccagtttttgtagcatcaacagtagcgatgagcatgatgttaggggcatgtagctatcaaaaagatgaatcgcaagcaaacgctaaaggggatagcggaaaaagcggtgcgaagcaagttattaacttaattgaaacacaagaaattccaacgatggatccagcgttatcagctgatgcagtttcttcaagagtaatgactaatacgatggaaggcttatacagtttaggaaaagatgataagctagttcctggtgtagcgaaggaattcaaaaaatcagaagatggtaaaaaatatacatttaaattacgtgaagacgcaaaatggtcaaatggtgagcctgtgacggcaaaagatttcgtatatgcatggcaaagagcgattaacccagatacagctgcgaaatcagcgtacattatgtatgatataaaaaatgcagagaaaattaataaaaaagagatgagtccggatcaattaggggtaaaggcgattgatgattatatattagaagtggaattagataattcaattccataccttgtagatttaatggtatatccaatcttctatcctgtgaatgaaaagtttgtgaaagagcaaggtacgaagtttggtttggaagcgaatacaactctttataacgggccatttacattaagtgattggcaacatgaacgtagctttaaaatgacaaagagcgcgtcatattgggacaataaagaagtgaagattgaagaagtaaactttaatattgtaaaagatacatctacgccaattaacttatatgaaacaaatgcaattgatcgagcgtcgttattagcggagtttattgataaatataaaggaaaaccagatttccaaacagtagaagatacatctgtattcttccttcgtttaaatcaaaaagatccagctttagcaaataaaaatattcgtaaagcaatttcacttgcttttgaccgtaagccattcgtggatacattattaaataacggttctaagccagcgacaggattaattcctgataacttcattaaaggaccagataaaaaagatttccgtgctgtaaacggggatattgtaaaaccaaacgtgaaagaagcgaagaaatattgggaagctggtaaaaaagaacttggtaaaaatgaaatcgaattagaattattaaatgaagatgtagagttatcaaagaaaactggtgaatatttaaaaggtgaattagaaaagaatttaccaggtttaacagtaaaaattaaacaacaaccattcgcacaaaaactaaaattagaagatgcgggcgattatgtcatgtcattctctggatggagtgcggacttcccagatccaattacatatcttgatatgtttgtaacagatgggtcacaaaataagatgaagtactctaatccaaaatacgatgaaatcattatgaaggcgaaaaaagatggaagcgatgtaaatgctcgttggaagaacttattagaagcagaaaaaatgttacttgatgatgctgcgatcgttccagtatatcaacgtggtagagcatatttacaaagagattcaattaaaaatatgtataaccataaatatggcggcgatttaagctttaaatgggcgtcagtagagaaataagaaaaaaaagcaggtgatcacctgctttttttaatacgttcgtttcttataaatgccttttccgccaacttggttccagccagattgtacatccaaacttttgttaacaaacttcattttttcttttccaccaaagagcttttcgccgatgctatttgtaatgacaccaatcaatgctgttattccgatgatgagggcagcaaccgtaataaaatcaataaaaaaagcaatcatttgaaaactccccctttgcctgtctgtatgtttattgtatgagataaaaaatgaaaaagaaagaaatgtcagaaaaatatttaatttactttagaaatcatgtagacaggagggaggatatttgttaaaataagaacaaatgttcctttttattctcatttgtatagtcttacatttcttaattgatttatcaagaaaaagtaagaaaacgttctctttttcatagggaagattatagataaataactatatattatatgaaaaatctatgggaagtgagtagtaaaagggttgaaagttattgttaaagtacagctgaaatgagcgtaatcatgttacatagcagtgaaatacacgggagagttttctcaactagcaggaaatttactgtatatttcttgcaaaatctattgtataatgattatagaagttacttattaaaagtaattgttgtttattataagttgttgcttacatgaaatgtgatttttgtacttttcaataagacaagttatcacgaaaaattgctgaagttagaaattaaaactgtatttagtacagaatttgtactctttaaggagagtgagctttgtatggtaacattatatagttctccaagctgtacgtcttgtagaaaggcgaaattatggctagaggaaaatcatattccctatacagaacgtaatattttctcagatccattaacgattgaggaaattaaagagattttacgtatgacagaaagcggaacggatgagattatttctactcgttcgaaagttttccaagaattgaatgtaaacttagagtctttaccacttcaagatttatataagatgattcgtgactatccagggattttacgtcgtccaattatgattgacgagaaacgccttcaagttggttacaacgaagacgaaattcgtcgtttcttaccacgtacagtaagaacgttccaattacgtgaagcacaacgtcttgtaaattaattataataatatgaaaaccttctacctattatatagtagaaggttttttttaatgtttcacattgcgtaatcgaacttgttgtacaataaagccgatgcataaaatagtgaaaatgaacaaataaggaatgcttgcagtgaaacttggattgttatgaaaaaaggttgcaagtctgtcttcatgtgtaaccatttttcctgcagtataggcaagaattgctgcaccgcaataaatgaggaatggaaatcgctccataagtattaaaataagtttgctgccccaaataataatcgggatagaaatgagtaagccgattatgacgagtaaaaatctcccgtgagctgcacctgcaatggcaataacattatcaaaccccataacgagatccgcgaaaacaattgtccgcacagcttgaaataaagttgtttttccttgaatagaagaaagatcgttgctattatcggttaataaattgactgcaattaatgtaagtaaaaccccgccaatcaattgtagaaatggaatgtcgagtaaatagacagctagtatagtaaggacaattcttagtacaatcgctaaaagagtaccgatcaaaatagccttatttcgtttcgattcaggtaaatttcggctagctagtgcgatgacgattgcattgtcaccacctaatacaacatcgataccgacaatcattagtacggatgttaaaaactctaagtccattcgtctgcctccatttatgatgttttaataagcgaactatatgtatgtgatgaagaaagttgttgttaaataatctcttctaatagaagtttcactttattacagtgtacgggggaatgtggaaatgtatgtccaaattttttgtaagtaagaaatcgctataataatatatttacgtagttgatcgagtaaagataggcatataactatttttgtaaaataaatcgattttatttccattctggagaatcttatcataaaatgagagtacaagaatctattgatttgtcatatgagtggggaatcccttcataacaattctaagcaggaagggagagttgtattttggatattgaaagaattaatgatcatacgatgaaattttttattacgtacattgatatagaggatagaggatttaatcgtgaagagatttggtatgatcgcgaacgaagtgaagagctcttttgggagatgatggacgaagctcgtgatcatgacgatttctttattgatgggccgttatggattcaagtgcaagcagtcgataaagggattgaagtacttgtcacgaaagcagagctttcaaaggacgggcaaaagctggaactaccgataggggtagacaaaattatagatattcctctagatgaaggcatcgaatcattattccagcaagaattagtcgaagaggtagaagaacaaacaggaacaaactttaatgaagatggtacgtttggctttttaattaagtttaatgattttgaagatgtcatttcattaagtcatcgtcttatctttgaagatataaaagatgagctgtattcatttgagaaccgctattatgtatatgtggaattcgatgaagtgctacatgatgaagaagaaatcgatcgtattttaagtattattttagaatatggagaagaatcaactttaacaattcatcgtgtaagtgagtatggaaaacaaattgtgaaagagcatgcgcttgaaacgattcgcaataattttcctgctaaaacgtaggccgatttctgtagtatgaaatcggctttttatatgaagaataggaaagctttcttagttaggaggtaagagatgaaaaatacgttaaagctgattttctttatactgctattgttcgcattatttgtttcgttacgtatgtttattgatgtagcattttattcagatgtgattgggataaaagatgtttcggttttaggtattattagtattttatttacagtatctgcgtttttaattggttgcgttattttcttagagaaccgtcatccgtcaaaaacacttacatggctcattgtgttaggtatttttccggtatttggattcttcgcttatttattattcggacagaactttcggaggaagagaatgttccaaaagaaggcgttgctcgatgaacaagcgtttttacaatataaggggcatgaagattacgaagaacggattttacgcaatcataagcatcaagagctgttatttcgtttagcggatcgcttaggcgctttaaatatttcatttcaaactgaaacgagaacattaacaaatggagatgaaacgtttcaggccattttagatggattaaaacgagcgaaacatcacattcatatggaatattacattgtgcgtgatgataagcttggaacggaaattaaagatattttaatacaaaaatcaaaagagggcgtagtcgttcgttttttgtatgatgcggttggaagttttaaattatcaaaatcgtatattgaagaattaaacgatgcaggagtcgaaatgattccgttcttccctgtacgctttccgattttaaacgataaaattaattatcgaaatcatcgaaaaatcgttattattgatggaaaagaaggctttgtaggtggattaaatattggtgatgaatatttagggaaggataagtacttcggcttttggcgagacacacatttatatttgcgtggtgaagctgtacaaagtttgcagcttattttccttcaagattggttttatatgactggtgaggctgtgctagcccctgaatatttacaagcgaaagcagttgagggggagcattggggaggcgtgcagcttgttgcaggtgggcctgataataaatgggaaacgattaagcatttatattttgccatgattgcttctgctcggaaatccatttggattgcaacgccgtattttattccggatgatgatattttatccgcattaaaggttgctgcacttgctggtattgatgttcgtttattaatgccgagtaaaccggataagcgtactgtcttttacgcatcgagatcttacttcccagagcttttagatgcaggtgtaaagatatatgaatatgaaaaaggttttcttcatagtaaagttgtcatcgtcgattctgatttagcttcaattgggacagctaatatggatatgagaagttttcatttgaattttgaagtaaatgcctttttatatgatacagatagcattcgaaaacttgttcaagactttaaagatgatttagaagaatcaagtgaaattcatgttgatcattttcataaaagacgtcttcatagacgaattgttgaatcaacataccgcttattatcacctttattataaaaagagatgtccgaaattgggatatctcttttttaaaaggaatttgtaacaaattgtagaatataaggagctgaaagggtgtgattacgatatttatcgctaaaagagaaaacggagagaaaattcatttactctataattgtaatgaaaagcttttgcgccgtatgcgtcaacaagaacgattcttttgtgtagcttgtggaaaggaagtgcaaatgaaattagggaaacaaaaaagttggcattttgctcataaaaaagtggattcatgtcttgccttttatgaagcggaatcaacgtatcatatgcacggtaaagaattgttatatagatggttcaagcgtcaaaactttcaggtggatatagagtactaccttccagaaattaagcaacgaccagatgtttttgtagagagggcgggcagaaaaattgcaattgaataccaatgtgcaaacctcgctatagagcagctgtacaaaagaacatattcgtattggcaagctggtatacaggtcatttggatcgttggtggaaatcaattgaaaaagcaatctgcatattggatgaaattttcctcacttatggctttctccttacaatcttatcctcagccacttcttattttcttctgtccgaaacaaaaatcatttatgaaatgtgcatttgtcactcccttttctacaaatgtctttttctcacatactatatatttaccaactgatacgactacttttgaaatgcttttttctcccgttcctttcgggaaagaaagattgggtgaagagtggaagaagagaaagaactacttccgcaaaaatgccctgccgatttggaattataattataagtcattattacgcctcttatatcaatttaaatgtaccccagcaagctttccttctgaaattggtgttccactcccttctgcatttgctttacaaacaaacccatttatatggcaagcttttctatatatgaagtgtatagggaagcttgcagtgggagagtgtatttctcttcaatacgtgtgtagttatgtaaaaaggtatacgaaaaggcggatacttccgtacttttcaaagcatatatggaaagtggcagttactgaatatatgacatttttatgctatataggtgttttgcgtaaagtgggaacttatacgtaccggaaaataagggatgtcatgatgttaaaaacagaggaggagattataaaacatgatgagatttgcttaatacatgcgctatctttatttgaggcaaattttaacatgagaggaggaaaaggggatataataaagaatgattgtgaaggaattacataagaaaaaaacgaattgtacttaagtagagatatttaaaggagggcttaaagaatgtctgaacaaaacaaagcgaaagcattaccagatcgcaacgagattgaagaagcaagtacgtggcgattagaagatattttccaaacggatgcagaatgggaaaaagaatttcaagctattaaagagctattgccgaagttaactgaatttaaagggaaacttggtgactctgcggacaatttacttgaggcattgcaatatgaagatgaaatttcaatgcgattaggtaagttatatacatatgctcatatgcgttacgatcaagatacaacaaactctgtatatcaagcattaaatgatcgcgcaacaaatttatattcacaagtatctagtagcacagcgtatattgttcctgaaattttatcgatttcagaagatacactgcaaacattcttgaaggaaaatagagatttaagtgtatatgaacatgcattagaagaaattacacgtcaacgcccgcacgtattatcagaagctgaggaagctttattagcggaagcatctgaagtaatgagttcatcaagcaatacattcggtatgttgaataacgcggatttaaaattcccatctattaaaggggaagacggagaagaaatagaaattacacatggccgttacattcagtttttagaaagtgatgatcctcgtgttcgcaaagatgcatttaaagctgtatatgaaacgtacggaaaatttaaaaacacattcgcaagtacgttaagtggagcagtaaaacgtaataatttcaatgcgcgtgttcgtaaatatgattctgctcgccaagctgcattgagcaataataatattccggaagcagtatacgatcaactcgttgaaacagtaaatgacaacttacatttattacaccgttacatcgatattcgtaagcgtgcactaggacttgatgagcttcatatgtatgatttatatacaccacttgtaccagaagtgaaaatgaatgtgaaatacgaagaagcgcaagaccttttattaaaatctttaaacgtacttggtgatgaatatgttgatattttgaaagaggcatatgaaaatcgctgggtagatgtgtatgagaataaaggaaaacgaagcggggcatattcatctggtgcatatggaacaaatccgtatattttaatgaactggcatgataatgtaaataatttatttacacttgctcatgagtttggtcattcggtgcatagttactatacaagaaaaacacaaccgcacgtatatggtgattattccatcttcgtagcagaagtggcatctacttgtaatgaagcgcttctaaatgattatttattaaaaacgacagaagataagaaagagcgtctatatttattaaatcattatttagaagggttccgtggtactgtattccgtcaaacgatgtttgcagagtttgaacatattattcataagaaagtacaagaaggacatgctgttacgccagacatgctaacggaaatttactacgatttaaataagaaatatttcggtgacgctttagtaatcgatgaagagattggtttagaatggtctcgtattccacacttctactacaactattacgtatatcaatacgcaacaggatttagtgcagcgacagctctatctaaacagattttagaagaaggacaaccagcagtagaacgttatattaacgagttcttaaaagcaggaagctctgattatccaattgaagtgctgaaaaaagcaggagtagatatggcatctcctgaaccagtaaaagaggcactacaagtatttgaagagaaattaaatgaattagaagcattattatttgaagaaaagtaatgaaaaaagacgagggattgtatcctcgtcttttttgttgaatagatttaatgtcgatatttgttgaaaaaaagatgaatttctttattttttctaactgaaaggatagctttacggctgatttttgaacttaaaaccctttgaatcgttttttataattgaaataagagagtgtgataacgatgattccgaataaaagaggtaaggcaataattttaggaaaagcttgtagtagagagaggatgtacaagaaaaaagaaacgatgacagctagaaagagaagagcaatataagattttttcataaataaaccccctaaatgaccttttttatagcttattcaaaaatgaaaacgtttagaatgtgacaaaagtgtgaaattcgacaaaaggggttgtcatctgacgtcgaatcttgtaatataataagcgtgaacgaattcacatacaaacatatacccctttgtttgaacgtgaaaatttctcccatcccctttaatatttttataagccgtaaagaaaaagacctggtgtttacaccaggtctttttcttttgctatccatttccaataacgttcgcattttacttcaatcatttgtacttttcgtttcagttgtaatttttttagttcgcgctcaatttcttgctgcggacagtcataaataaatgctacttcttttgaagatataaattgtgttgcttctagtagcacttctaaaggtggtaatggttctggctcaatttcacattttacaagttctttcaataattgtacgtatacatcgtaggaataatttccagcgattttaataccttcttcatctgagttcgcatgaaaaaagacgagggaaggtatttctgtaatatgcatttcattcgtgaatttcaagtcacattggaaagctttttttgcactagcagaatgtagatcttttttaaattcttctacatcaatattgctatctctcgcacatgcaagtaatagttcgcaatcagggtttgatacattttcaaggaaaatgtattcttggagttttcgcaaaaacttcgaacctgcttttcggccttgcaactccgctgccttaattgccatcgaaactaaatatggtgttgacgatgcttcttgcatatgtacctttccatcacatgaaaaaccttgtaaactggttgtcttttcccacacaaatcgaatattagcaggtttattccatttgtgtgaggaagcgttcgttccatccactttccctgttacgatatgacgaatagagaagtatttcccgtattcaagccatagtttaataataaaaggctcaatttcccagcaatctttacaaagtggatcaataaataaatatgcttctacagacttatgctcgcatgcggaaggagatggcatatttatatgctttgcttcctgcttatccattacacttcacctgtttcgtttggagtattaaccatatgctgagcggttaatgctaaacgttcaaaaacaaactctcttatatgaccatgcactccagtatcatccattgcttgctccatacatgatagccaagcctctgctcgttttggggtaatctcaaacgggagatggcgtgctcttaacataggatgaccatgttcttcagtgtacaaattaggaccacctaaatattgggttaaaaattgcttctgcttcctagcggtttctgttaaatcttccgggaagatgggagataagtcagggtgtttactgacataggaataaaatgtatctactaatattgcaatgcattgttcaccgccaattgcttcaaatggtgtcatcggttgcttgctcatcctttataaactcctttttccatgaaatgtatatctattgtagcaatggaatgttcgagagggcaaataaacagccttctcaaagattctttgcttattctacgggtgtaaccttttttagtgagatgtatccactagtgaaacatattcactagtggaattttcactttagcgtgctttgttttgtttggcaaggaaaaagcgttttactttgttatttgtatggcgaacgggtatgttatgttgcgttaataaatcaataaatgcagcttttcctgtttcttcatcttgcacttcaaattcaatttcataatcatcgtgattgtaatagaaactatgatcaaagacaagcgttccgcctttaaataatgtttctgctctttctgttgttaaactacccatatatgttaaagcagaaacaggaatttgtaatttgtgtaattgatctactactgctccttgaatgattgtgtttgtttccatcatcatttttgcttcgtcttctgttacgacttgatgcgtttctaataaaccaatttctgcaggttgtttcaacgttaacgtataagtttttcctttatgacgaatacgaagtgcagagccagcttcttttaacgagaagtcaggtgtttcaaagtagtgattcacttgttttgtaaatgcttcaatagaaaacgatttacataatgtatcgaattcttcttttgtaacgatatttttgaattcaatttcaatttcttgtgtcattgtataatctccttttgaaaaataattctttacacattatcgctttttcataaatttggttcaatgttttatttgtttgcgtccatgttatgatacaataatactgttaagtaagacaggaagttgagatggaggagttagagcatgcaaaataaaatccaagttaagagcgtagaaaagagagagaatgctcttattttttgtgcggaaaatagtgaaatagaggtaaaggagttaagtgcgcgtaatcacgtacttgtagactcagacaatttatcatttttatatatcttagaaaatgaatcatctttcatttatgtaagtattccgcacacatgctgggaagcaatgcatgaagcgatgaatagcgatgtggttatgttcgttcgcgtgaatgacattgaaatggaattagaaggattaaaagaagaagtagaatatttagttgaaaatattgaaggtaatgcaaattacggagaagaactagtaactgctgtagaaaaagtatttctataagcaaatggattgattttggtggtggttgaaatgaatcgaaattgggaagaatttttagcaccttaccaccaagcggtggcagagctgaaagtgaaactaaaaggaatgcgtactcaatttgcaatgttaacagagcattctccaattgagtttgtaacaggaagggtaaagtcggttgcaagtattattgataaagcggagaagagaaatgtaccgctagaccgattgagagaagatatgcaggatattgctgggcttagaatgatgtgtcaatttgttgatgagattaagcctgttgtagaatatcttcgaaaacgaaatgactttgaaatcgtggaagaacgtgattatgttacgcaaaagaaagatagtggttatcgttcttatcatgttgtcattagttatcctgttcaaacgattcagggtgaacaaaaagtattggtagaaatccaaatacgcacgctagcaatgaacttttgggcaacaattgagcattctttaaattataaatatagtggacgttttcctgaagatattaaaataaggttgcaacgtgcagctgaagcggcgtttttattagatgaagaaatgtcttctattcgtcttgaaattcaagaagcgcaaaaggctttttcaagaaagcaagaaacgaaagattctgaatcataaactaaagggtgttgggcgatgaaatttacaattatgtcaaagggagatcaatcatcagatacactggcaagcacgatgaaagagtacttgctagattttggatttataatggatgaaaaggaacccgatattgtaatttctgttgggggagatggaacgcttttatatgcgtttcatcgttattataatcgattggatgaaacagcatttgttggtgtacatacaggacatctaggtttctatgcagattggttaccgacagaagtagagaaattagtaattgcaattgcgaaaacaccattccaagtggtggaatatccgcttttagaagttattattcgctatgtgaatggaagtaaagagtcacagtatttagcgatgaatgaggcgactgtaaaaagtgcagaaggtacattagtaacagaagtagaaatacgcggagaatattttgaaacattccgcggagacggcctatgtatctctactccttcaggaagtaccgcgtataataaagcgcttggcggagcgattattcacccatctattgaagcgatacaaattgcagaaatggcgtccattaacaatcgtgtatttcgtactgtaggatcgccgctcgtattgccgaagcatcatacatgtgtgttaaagccagctgcaggaatgaacttacaaattacagtggatcatttaacgatggttcatcaagatgtgaaatcaatccagtatcgggtcgcaaacgagaaagtacgatttgttcgtttccgtccattcccgttctggaaacgagttcgtgactcgtttgttgcggataaatagaaagggttatatatttgaacagatttacattgaaatgggatataggtccggctgaagagggaactttagttagggaatttttgaaaacgaaatgtatttctaaagccgctttaacggatataaagtttcacggcggggcaattgaagtaaatggtcaacatgcgagtgttcgtcatcagttgcgtgctggtgaagaattacgtgtcttttttccagttgaggaaagaagtgaagggatgatggcagaagatatccctttaagcattgtatatgaagatgacgcggttcttatcattaataaagaggcgaacatgtcaacgattccgtctagagaacatccgacaaggagtgttgccaatgcgcttttatctcattatgataagcagcaccttgcaagtacagtgcacatcgtaacacgtttagatcgtgatacttcggggcttatgcttattgcaaaaaatcgtttcgtgcatcatcttttatcgaagcagcatcaacaaaaagctgtgaaacgaacgtatgaagcaattgttcacggaaagattgtagaacgagaaggaatgattgatgcaccaattggtcgaaaatctgatagcattattgagcgaacggtttgtgaggatggacaaagggcagttactcattttaaggtaattgatagtacatatcataagacacatgtagcgcttgagcttgagacaggaagaacgcatcaaattcgtgtgcatatggctcatataggacatccgttacttggtgatagcttatatggagggagaagggatgaaatgaaacggcaagcacttcatagtaaatctttgacgttttatcatcctattttagagaaagagatgtctttcactataaagcttccaagcgatatgcaagaagtgttgcggcatacttaaaaaggggacaaaattcttatattataaagaattttgttcccttttttcttagcggaataatattaaaatttggttttcacccgtacgctttataacgaaaaatccactttcggcttttgtagcaatgccattgtcatttggacgacaatatccatgtgcttcgcaagtgccgtcatcacgtactaacatttgtccaattaatccgacaggaagccactcggcgcgatcttttcttgctacatatttgcaagttggatcccattctgtatttaaaagaggttgtatttcttcggcttccgtccatacatattggcgttttccaaagttatctgttttataacgtttttgccaacttaaagccccgctatttcctataagggcaggggttgcactagatattcctaaaatgaacgaatcgcgtgaagtagctatccgaattttttcttcgttactaaatgtaacgaaataaccgacatcaataggtttataaccttcggtttcaaacatttgtgcaaaatccgttccgcttgcattgtaagacgcgccctcaatgtacatttctccattatgagcaagccatttagccccgatattatggtcggtgtcgcttacaccatttgcaataaaccaagaataagcttcttctgcaatgccgaagcgccccataatatggctacctgcaaaatgagctgttgatgtatgatgaccttccgcatgagaagaggatccgttagcgatagttgcgtttccttctgcgtgtgctgcttcgcctaaagcaattgtctgtttaccctccgcatgagaataagccccgcctgctgtcgtttcacttccctcactatgcgaactatgtccagttgcttttgagtttgatccttctgcatgagagaaagaaccttttgcgtgtgttaataagccttccgcatgtgctgccatgccctccgcatgagagtgaagcccctctgcatatgcatatcggccgccccttttaacttttgtattttcaggtgtaggtgtctcaattatgaggggtttttcagtttgtatatcattcgatgaagccaatgcctcttttattttttttactttgtttataatagcagctggaatttctggttccacttttttatttattgctacagaaatattttcttccgtcttttcttctgcttgattagaatgtattacctgttcatcttgatttgagagctgtttatttttttgttgcatctttatttttctgcgatcgattatgcggctcatcacagcattttctaaagagacatatgttggttttactttgcttttttttgatgactcttgttcttccagttcttctatcgctgcagcccgaatactacaccagttgttaattccgtacatgggcagatataaagggggaaattttcttttttgtttagaagattttttcttcattctgtcacctcctgcgacattatatgtagtgtaattaaaaaaagatgcactttattgcatctttttttaattactttacctagttttatatgagatctgcctaaataatgctaagtaaggtagttatgaaattggacggaatttctcagcgacaaaaggtaaagaagaagggacagagatagtctccatttcaggataacgtaatccggttaatttgccaccaaatacagcaccagtatcaatattgactgtctgattgacgaatcgaggttctgttactggtgtatgtccatatacaatccaagcttgccccttgtattcttgcgcccaatcgcgacggacaggtgagccatcggcatgcttttctcctgtaatatcgccatataatacaaaggtttgtacttttttatctcgtcttcctatgtaatcttgccgaatcccagcgtgacatacgattactcttttttcatctagtatgtggtagagcggtgattgttcataaagagtgataaacttttcttttataatgttttgcttattaggaggaagtgcctcatattcagcaacagttgtttcaagtccgtgagcgactgttacattacgcccaaggaaaaatcgatatagtttattacagtgatttccaggagcgtaataagcttcttttttatgtatgacaagttcccatacaatttcaatcatacgtaatgaatgaggaccacggtctgtaatatcgccaacgaatgcaagtttacgttggtcagggtgaaccggtagaccgctactccagttatatcctagcttctctgttaaattttgaaactcttggaagcatccatgaatatctcctataatgtcatatttcatatttaaacctccatcgtatttttcattagtatatctaaaaaaggatagagataaaaatatagcgtttttgtgttgttcatttaaacataaagattttcgttcttgagcgaacatttaaaatgaatccaatcgcaatcatgtatgtaagcagtgaacttcctccgtagctcataagaggtaatgttatccctgtaatgggaagtaatccgattgtcatcccgatattttggaatacttggaaagtaaacattccgattgtaccagcgcaaatgtaactaccgaaaggatcattactttctaaagcaatatgaatcattcgaaaaatgagtaagaaaaaaagagaaataatgacacttgcgcctagaaatccaaattgttcagcgacattagtgaaaataaaatctgtatgtggttctggaaaatatacttgtccattttcccacccttttccttgcatttctccggatccagtcgctaagaatgcttgtcttaattgatagccttgtgcatcatatttgtaaggtgctaaccatccgtagaagcgatttaattgatattcttttaaaatgtgtgctttaaagaaatctgtgtgagtaaaaaaaatatatattaatgtagttccagcaacgaaagtagctgaaactaatccgaaaataaaacgccatcgtatgccagaaactagtatcattgctgcaagcatcgctgaaatgaccattgtatttcctaaatctggttcctttgcgatgagtagtagtggtggcaaacttgttgcaaatatttttccaagtagtaaaaaatcgtcatgtattgtttgggaaaaatatttctcattatggtttgctataattcgtccaatgacgataattaaaaataatttcataatttcagaaggctgaaaatttccgatgcctgggagcctgtaccaagcggtagcgcctttaattgtaacggcacctggtacttgaagttctagtccaataagtagtaccattgcaaagctgtacaaataccaagcaattttttgataacgatcgaagtcgataatcataataacaccaatggctataaatccaatgaaataccattggatttgctttagtacaaaattgacgttttgtaaaaatggcggtaaagaggcttgcgcacttgcaatagcacaacaactaacaatcccaatggcaaataaaataaatagtaatacgtagtctatttgatattgagaatttggatctttcaatgtaggtattcctttctactgctctttatagtaatggattttatcccgcattaatgggcagtaagacccctacctcaaaattcagcgaaagcgaagaagttaggtgggggatcaactgcccgtaaaagcccgattggtgagagctgattaaagtttcactttatagtatgagaaagaatgtatgaactatacgaatgattcacatatagtccatacacttttaattttgcagagtagtttaattgtttaactctttaataattatatccaaacaatgggaaagacgtacatgtgcgtcaggaaaaatatctagttgatgaagatagtattttaaggaacttttacaccattggtaagcactaagtagagctgctctatagtctgtagtattttgtaaaaagccatattcttttgctgttataacgaggtgtgtgaaatcttcacaaccttgaaggagcttattgtgtatttgttgtccagcatggtagcgaaattgacttaaaggctcagaaatgtatattgcatttcctttagaaagtaaagaaatccatgaggccatatcaacactacaagaatattgtcgctctttaagagtgccaaaaggttcagtgagcaattcctttcggaacaaggtagttgtaggctcaccgataatgttgtgtccaccttttaacatccaattacctaaaaatatcccgtttaatggggtgtcttcactatataacctttgtgttggatgggaatcacctattagatttccatgatcatcaatgcgtactcgataagaagtaacaagagcaagatttttattgggatcttgctcaaaataggtcatcattttttgtattttatgcttataaaacacgtcatcgtccattaaaaaatttatatactcaccatttgatttttctatgagcataaggtcattgtgaaattgtcctagagtaggaatatttcgaatgtatgttatatttttataatttggtaagtattgttcgcgtattaaagttgctgtttcatcatttgtactatcatctccgatgatgatttcaatattagaataagtttgtgccaatgcactttctagagcaattttgaaataatgaggccgattataagtgggaataaggatggaaacgagaggtggatttttttcattcatcatacataacttcctttcagaagcttttttttgtaagaacaatatcttggtaacttgtatattcatgtctgccgcaccataaaccgtaatgcggcttattgattatttctaggccgtacttattcaatagattgcaaatatctgtctcaggataagcaactgcgaaattcggaatatctttatttacaacgtagcaattttcgattcgatgataaaaacctaatgtactttgtcctgcatttaaataataggacgattcaggatttataagaaagaatgtaatgaaacatctcccgtctttttttaatacacgtacaatttcagatacgtaatgttctaattcttttgggagaagatgcgtaaatacagaagttaaaaagataaaatcgaatgtcccgtcttcataggggaaacgatattgagaggcatcttcttttccttctggattatagaattgattgtatatgtcaacatgttcaaagtgaaaattattacgcatagttgaaatgttattttggcaccaagtaattccatctttaaacaaatcaaatccataatacgctccatcatcatttaagtaattcaataatggtacagccattcgaccgacgccgcagcctacatctaatactttttcatttggttttaaagcgccaatttgaataaaatgctttaggaactcttttccaacttttttgaagtcgccacctacatattggacgagttcaggaggggggagtaaagtcatttctttgttaagttcactcatgagtatacccctttcttgtatgagaagatgcagtaaatctattaataaaattttcaatttgtattgagagaacacaggaaaacaattgttatatgtaaggagattccgaaaaagaatacttaattggattagaagtgagagaaggatgagtgaaaatgaaatctcctatagattaaatcttttttattcttttctccaataaacgccaaatacatcaattttagtaataggggcttttaaatttcgttggtttctaaagtctgtcacagcctcagcgcatggcggtagcccgtagtcatcgataattatatagccacctttagaaactttatcatataagttcacgagaccatccattgtggattcgtacatatcaccatcaagccgtgcaattgctattttttcaattggtgctgttggtaaagtatctttaaaccagccttttaaaaatttcacttgatcatttagtaaatcatattttttgaaattctcttgtacttgttctaaagagacgcgtaaataatcgaatgtgtgcaaataatcaccgtaatcttttggatattgttctagattcggtgctggcaaaccttcaaatgaatcagcgacccacacattacgattcgtaatgttgtttgcttgtaaaaaaccattcataaaaatgcacgatcctccgcgccatacacctgtttcaataaaatctccctctatattttcacgaacaacggtttccattgcctcttgtaattggttcatacgttctcgaccgatcatgctatgtgctgctcttggccaatccattccatcatggcgttcactttttgaaacatttggttttacaatttttaagttatggttttcagcatattgcttaatgaataaagggagggggactgtaactggctcgaattctagttcttttgaaatatgtagagatgcgggtaagtatgcctcatattctaaccatatttcaaataaaatggtcttctttagcaattcgagataaagctgaacagcagatttactttccatatttgtgcctcctgcaaaatgtcatacaacaatatgattatgtagatagcgaatgtttcatgattgaatttgaaattgaaaaagcagtaaaactgatatcagttttactgctaagtaaaaatttaagcgattttttcaataataatagatgcatttgtaccaacagctaatgatagcccaagccctgtaacgattacttcaattaatgatggagttgtcgtaatttgcgtaattgcttgaacaacgataggtgctccaactgagattaaagtggccccagtacctggaacagataccccatttacttggattgtaagtcctcctaatagacttactgctgcagtgtatacgataacggtaattttatagaatccagtttgactaattacgaaagtatcaggatctaattgagaaattgctgtaccaaactgagatccaacagtattaaatggtactggagcattaagtccaatatccaaagaaatcccagcggagttaaatgcatacaatcctgctggaagccctagtccagatggtccagtcggtccagtcggtccagtagccccagtagccccagtcggccccgtaggtccagtagccccagtgtcaccagtcggccctgtaggtccagtagccccagtgtcaccagtcggccccgtaggtccagtagtcccagtgccaccagtaggccccgtaggtccagtagtcccagtgccaccagtaggccccgtaggtccagtagtcccagtgccaccagtaggccccgtaggtccagtagtcccagtgccaccagtaggccccgtaggtccagtagtcccagtgccaccagtaggccccgtaggtccagtagtcccagtgccaccagtcggtcctgtaggtcctgtaggtcccgtaggtccagttggcccagtcggtccagttggcccggtaggtacagtcggccccgtaggtccagtcggtccagtcggcccggtcggcccagtcggaagggtaaacggtggtatcggtggtaatgtaggtcctacaagattagggtcaaatgcactagctgataaagattcatcgggatttaatccatttgaataattattatttgacataaattcacctccataaagcgttcattatatagtagatgcaaaaccgaaagaaaatgacacggacatttgaattattgaaaagaaatcttaaactacttgaacaatttaaaaaaatggaaagtttagtatatgtataacatatgattgatttggaagagggtgattatgttgaacaagcaaggaattacaattagtttatgtatgattgttcgagatgaggaggagacaatagcccgttgtttagaaacagttgaaaaaattgtggatgaaattatagtagttgatacaggttccgtcgatcgaacgaaagaaatcgtagagaaatacacttctaacatatatgatttccagtggattgatgattttgcagcagcaagaaatttttctttttcaaaagcgacgcaagagtatatattgtggctagatgcagatgatgtcttattagaagatgctcaagaagcattgaaacttttaaaaagagaattagatcctaaaattgatgctgtttcgatgccttatcatcttgcaatggattctaacgggaaacctttatattgtacaaaaagaaatcgacttgtaaagcgtgaaaaacaatttcaatggtttggaaaggttcatgagtatttagctatttctggtgaggtttttagtagtaatgttgctattacacataaaaaagaaaaaaaagtaacaaatcgtaatttgaaaatttttcaaaatactgtagcggcaggtgaagaattaagtccgagagatttattttattacgcaaatgaatctacggataaccaaaaatatgatgatgcagttcttctatatgaaacatttcttaatcaagacgaaggatggtatgaagagaaaatttatgcatgtggtaagttaggagattgctatgcaaagctaggaatgtgggagaaggcaatcgaatcttgtgtgaagtcgtttcggtatgacgtccctagaggagagaattgtacaagaataggatatatatatatggaacaagaaaaatataatgaagcgatattttggtttaaacttgccacggaagtaccaatggcaacggaaagtcctttccatagtccagctagctacacatggctaccctatttacaaatgtgtatttgttatagcaggttaggggagcaggataaagcgtattattacaatgaattagcagcttcttatgttccgaataatgctgcaattgaatataaccgtaaatattttcggggagtttttgataaaccatataaagtgtaataggtttcgttttttagaaatgatttatcgctattctaactctaatagattggttatatattagagtatcagtaacgtaaccaatataaataaaagattttatactgctatttgcgggctaataatcattgggggatgaacaaaatctgcactttatagaattcatatgagatttatatttctaattcaatttgcataaggagtgtgtgaaatgaatcgcgaaaaaagttctttatatgaagaaaaatccgagcattattataatgcagcgaatccgaatttattaaagcatataaaaaaggaatggaaagaagttcttgatattggttgctcgagcggtgcattgggagcagctattaaagaaaacggtacacgtgtatcaggaatagaggcatttccagaggcggcagaaaaagcgaaggaaagactagatcatgttattttaggggatatagaaaaaatagatcttccttatgaggaggggcaatttgattgcgtcctatttggggatgtattagagcatttatttgatccgtgggctgtgattgaaaaggttaagccatatataaagcaaaatggtgtgattttagcaagtataccaaacgttgctcatatttcagtattagctcccttacttgctggaaattggacgtatacagaatatggtttattagataaaacacatattcgtttctttacattcaatgaaatgctaagaatgtttttaaaagcaggatattcaattagtaaagtagatcgtgtatatgttgatcataaaatgtatgagccgcttattgaggagttatatggaatttgtaaaaaatatcgtcttggaagtggcttcatggctgagacagttgtatttcagtatattattgaagctgaaaaatcacaattatgagtgctgcagacaaaacaatattatttgttacatgcataaatgatcggaaattgtatgcaaactgcgtgcgacatatattgcaattgttagtaccgccagggtatattgtccaatttatgccgattcgaaatgcgaaaagtatgacgagtggatacaatcaagccatttcgcatccagcgaagtataaagtgtatttacatcaagatgtttttattataaatagggcttttttatacggattacttcaattatttgaggaacatgaaaaccttgggatgattgggatggttggagcgcaatatgttcctccgactggcgtatggaacgaagggcgtggaattgtaggaaaagtcattggttatatgaatgatttgttttatatggcaagtttagaacaaccgtatcatgaatcaaaaacatttattcctgtagaatgtattgatggtttattaatggcgacacaatatgatgttccgtggcgagaagacttatttgacggatttgatttttatgatgtatctcaatcatttgaatttaaaaaagcaggatatacagtcggtgtacctgtacagcgcgatgcttggtgtatccattatcattttgatgtgaatatgacgaactatgaaaagtatcggaaaatatttgtggaacactatatgtcagatgtaaataaggaagaataaaaggggggacaaaaatgaaagatcatacaatattagtcgttgtttgtgtaaataatgaggagcttttcaaacaatgtgagagccaaataagaaacatttttgttccctctggttatgtcgtgcaaatttttccgatacgagatgcgcaaagtatggcaagtgcatacaaccgagccctttcatatccagcgaaatacaaagtgtatatacatcaagatacatatcttattaatcgagacgtgttttctacacttatatctctttttaaagaaaatgaaaagcttggtttaataggagtcgctggggctcagtttttaccgaataacgggatatggtgggaaggaaaaaatttagtagggaaagtgattgagtatagaagacggaattatcaattattaaatttagatcaggttttttatggtaatcaaccatttttgtcagttcaggcaattgatggtttattcatggcaacgcagtatgatattccgtggcgagaagatttgtttcaagggtttcacttttatgatgtgtcacagtctttagagtttcaaagggctggttatttaattggtatcccaaatcaagcaaatttatggtgtattcattacaacggggatgagtttgatgcggatacatatgagaagtaccggaaagtgtttgtagaacattacaaagatatattatctccatcataaaggagagatgaaaagtgaaaggaattattttagcaggtggtactggatcgagattatatccaataacgaaagtaacgaataaacatttacttcctgttggtcggtatccgatgatttatcatgcggtatataagctaaaacaatgcgatattacagatattatgattattacgggtaaagagcatatgggggatgttgttagctttttagggagtggtcatgaatttggagtgtcctttacgtatcgtgtgcaagataaagcgggcgggatcgcacaggcgttagggctttgtgaagatttcgtcgggaatgatcgtatggtagttatattaggggataatattttttcagatgatattcttccgtatgttgaagagtttgcaaatcaaaaagaaggtgcgaaagtgctattgcaatctgtagaagatcccgaaagatttggcgtagcacatattcaaaaccgaaaaatagttgaaattgaagaaaagccgaaagagccgaaaagttcttatgcggttacgggaatttatttgtatgattcgaaagtcttttcttatattaaagaattaaaaccttctgcacggggagaacttgaaattacagatataaataattggtatttaaaacgaggggtacttacttataatgaaatgagcggctggtggactgatgcgggaactcatgcttcgcttcaaaaggcgaatacgttagcgcgtgatattaattttgggaaacagtttaacggagaataggtgagaatatgaaagttgtagaaacaaattttaccgatgcaaaattgttagaaccgaggttgtttggagacgagcgtggctttttttcagagagttataataagcaggtgctagaaacattagggataacgtattcatttgtacaggataacgtatcttattcggctaaggcaggaacgattcggggactacactttcaaaaaaaaccgaaagcacaaacgaaactcattcaagttatgcaaggggcaatttatgatgttatcgttgatttacgaaaaaaatcaccaacatttaaacaatggaaaggatatattttaagtgcagataaccatcggcaattactagtgccaaaagggtttgcgcatggattttgcacgcttgttccgcatactatcgttatgtataaagtagatgaatattatagcgcagagcatgactcaggattactttgggaagataaagatttagcaattccttggccagtaaccgatcctatattgtccgataaggatcagatattaccattattagaggaatatgaagatagtttttaagtaggagcgttgtttatgaatatattagtaacaggtggggctggatttattggaagtaatttcgttcattacatgctacaaagttatgaaacatataaaattattaattacgatgccttaacatatagcgggaatttaaataacgtaaaatctcttctggatcacccgaattactcttttgtaaagggagaaattcaaaatggagagctattagaacacgttataaaagagcgggatgtacaagtgattgtaaattttgcagctgaatcacatgtggaccgtagtattgaaaatccgattcctttttatgatacaaatgtaattggaacggtcactttattagaactagttaaaaaatattcgcatataaaacttgtgcaagtgtcaacggatgaagtgtatggctctttaggaaaaacagggaagtttacagagaaaacaccgttagctccaaatagtccatattcttcaagtaaggcgagtgcggacatgatagctctatcttactataaaacatatcaattaccagttatagtaacgcgttgttccaataactacgggccgtatcaatatcctgaaaaattaattccgttaatggttacgaatgcactggaaggaaaaaaattaccgttatatggcgatggattaaatgtaagagattggttacatgtaacggatcattgcagtgcgattgacgttgttctgcataaggggcgtgtaggagaagtatataatataggtggaaataatgaaaaaacaaatgtagaagttgtggaacaaattattaatcttttaggaaaaacaaaaaaagacattgaatatgttacagatcgtttagggcacgatcgtcgttatgcgattgatgcagagaaaatgaagaatgaatttgattgggaaccgaaatatacgtttgaacaaggattacaagagacggtgaaatggtatgaaaagaataaggaatggtggaaaccactaaaagaccagtaaggggcatgttaaatgaaagagagggttatcataacaggagcaaacggtcaattaggaaagcaactatttgaagagttagactctgaagaatatgatatatatccatttgataaaaagttattagatgtgacaaatatatcccgaatacaacaagtggtacaagaaataaaaccacatataattattcattgtgctgcttatacgaaagtagatcatgcggagaaagaacaggaccttgcatatagaataaatgcaatcggagctcgaaatgtagcggttgcttcacaattagtaggagcgaagctagtttatattagtactgattatgtatttcaaggcgccagaccagatggatacgacgaatttcatagtccagcgccgataaatatatatggggcctctaagtatgcgggggagcagtttgtcaaagagttacataataaatattttatcgttcgcacatcgtggctatatggtaaatatggaaataattttgtcaaaacgatgatgcgattaggaaaagaaagaaatgaaatatctgttgtagcggatcaagttggctctcctacgtatgtggcggatttaaatatggttattaataagctcattcatacttctttatacggtacataccacgtatcaaacagaggctcatgctcttggtttgaatttgcacaaaagatattttcgtacgccaatatgaaagtgaatgtattacctgtttcaacggaagaattcggggctgcggctgcgaggcccaaatattctatttttcaacataacatgctacgattaaatggtttttcacaaatgccgtcttgggaagaaggattagagcggttttttatagaaaccaaaagtcattaacaaatttctgttaatgacttttttgtttgcctttaagcggttttatggtactataattatagtatcaggtactaataacaagtataagtatttctgggaggatatatcatggaactattacaagggaaaacatttgttgttatgggcgttgcgaaccaaagaagtattgcatggggaatagctcgctctttgcataatgcaggtgcaaaattaatattcacatatgcaggagaacgtttagaaagaaacgttcgtgaattagcggacacattagaaggacaagaatcacttgtattaccttgtgatgtaacgaatgatgaggaacttacagcttgctttgaaacaattaaacaagaagtaggtactattcacggtgtagcacattgtattgcttttgcaaatcgcgatgacttaaaaggtgaatttgtagatacttctcgcgatggatttttacttgcacaaaatattagcgcattctctttaacagctgtagcaagagaagcgaagaaagtaatgacagaaggcggaaatattttaacattaacataccttggcggcgagcgcgttgtgaaaaattataacgttatgggtgttgcgaaagcttcattagaagcgagcgtgaaatatttagcgaacgatttaggtcaacacggtattcgtgttaacgctatttctgcaggaccaattcgtacgttatctgcaaaaggtgtaggcgatttcaactcaatcttaagagaaattgaggagcgcgcaccacttcgtcgtacaacaacgcaagaagaagttggcgatacagcagtattcctattcagtgatttagcacgcggtgtaacaggagaaaacattcatgttgattcagggtatcatatcctaggataaatataatattaatttttaaaggacaatctctaaatgctgagattgtcctttttatttgttcttagaaagaacgatttttaacgaaagttcttaccacgtgatgaatataactataatagtacacgatttatttagctacgtatggaagtgggagggacgagtgtgaagaataaaaataaaagttcaacagttggaaaaccgttgttatatatcacgcaagtaagtttagaacttgctgcaccgaaaataaaaaggattatcctgacaaactttgaaaatgaagatcaaaaagagaaaagtaatagacaagaaaatattgtaagaagtgctgtggaagaggtaatagaacaagaacaacaagaagagcagcaagtggaagaaaaaatagaagaagaaaaagaagaacacatagaacaagaagagcaagaaccagaaccagtaagaactgtcccgtataataaatcatttaaggatatgaataatgatgaaaaaattcattttttactaaaccgccctcattacattccgaaagtaagatgcagaataaaaacagctacagtctcatatgttggatcgatcatatcgtatcgtcatggcattgtatctattatgccgcaaaatagtatgagagatattaggttgtctatagatgatatccaatcgattagtatggccggtttttaaatatgtaaaggtggtagaaagcttctaccaccccaatagttttttagtttactttacgatagaaacgtcgcgtaagcattgaatcgcacagaaacagcttaaatcaacagtaatgcaagtagttgtagatattaatcttgcatttggtacagctaaaaacgtacaaattggatcgtcaccaggtggtaccggagtaccgtcacctaatactacagttaatacacgtagcacagcacagctatcatcatctacactttccacacggaaaattggagatcggcagctagtaaggcttgaagatggtgcaaatgcttcaaaaggttctccagtttttgtgtataaaataaaagggcgtgtatttgctactgatgcagtattgtgtgcacctaaaaatgggatttcacaaccagatccacatgttgttgtagaacaatcttgtaattcattgatgaattttacaacgtcaactacacaatgagaagagccatggtgtttattttcgttacaactcattaatgtcactccttatcttcttgtttgtatttacattaataagatattggagtcgaggagatttggtcacaatctcaagacctttttttttaaataggcgaaagaggataagggtaggtggaattatgctgtttacaagctggcttttattttttatttttgcgttagctgcttttaggctcactcgtttaattgtttatgataaaattacagcctttttgcgaagaccatttattgatgaattagagattacggagccggatggaagtgtatcaacgtttacaaaagtgaaaggtaatggattaagaaagtggattggcgaattattaagctgttattggtgtacaggtgtatgggttagtgcttttttattagtcttatataattggatccctatcgttgcggaaccgttacttgcattattagctattgcaggagcggcagcaatcattgaaacaattacaggatattttatgggagaataatatattttcataatacgagaaaaagcggagtttaaaagaatgagggaacggaaataaagagttgttcatatagtaaatagacagaattgacagtagaggagatgtttgctgtgagcaataatctaaggcagaattcatatgacctgcagcagtggtatcatatacagcaacaacaccaagcacaacaacaggcatatcaagaacaattacaacaacaaggatttgtgaagaaaaagggatgcaattgtgggaaaaagaagaacacaataaaacaatatgaagaatgaaacactcatgctactgtgagtgttttttattatatataaaaagcggtatttctgtataagaaataccgctttttactagctaatttgtgcaactgttaatgctgcagcacgaatgtctacagttccaattaactgaactggcacaatttgaattaagtcaccaggatttaagttaataagaataacaccgctggatacgtctacttcaccagtaccaataacgttagaacgaactgctgtacctgatccaggaataatgttagctggtgtatttaatgataagaagaaacgaccagcttctggtgcagtaggtacgttatcaagactaattgttaatgtataactaatttgataaataccagctcgtagaattcgaatgccatctccgacacttactgtatcatttattacaggaacagtaatatttgggtttggacttacgctaggtaataatagtggtgtaaatagtgaagcaaactgaggtgcagacgcgttgaaagcaaaaccaaaggcaggtagtgtactagctggcttcgcctcacaatcgattttagtaaattcgcaatcagaagagaacatgtttttcactcctttatctgtttctactttcagttaatgaaaaggacaggttctatgttctagacaagttcccaattttaagaaatttacataagaatactctttaagcatggattgggtggcagaatactctgccacccaatccatgcttaactcattatttagttttaaatagaaacatcacgtaagcattgaatagcgcagaagcaacttaaatcaacagtaatgcaagtggaggttgatattagtcttgcatttggtacagctaaaaacgtacagattgggtcgtcaccaggtggtacagcggtaccatcacctaaaactacagttaatacacgcaatacagcacagtcatcatcatctatactttctacgcggaaaataggagatcggcagctagtaaggcttgaagatggtgcaaatgcttcaaaaggttctccagtttttgtgtataaaataaaaggacgtgtattcgctactgatgcattgttatgtgcacctaaaaatggaacttcgcaaccagatccacatgttgtcgttgcacattcttgtagttcatgtataaaacgaacaacattcgatacacagttgaaatcacactcatgttgatgatcttcattacaattgcagctcattatgttcactccttctcgtgagttctgacatacactattacaatatgagtgggatatggctgatattacgttaattctcacgataaaaacaaggaatttatataggagggatgtacataacgtgatataaaaaaagacatccttatttagtggatgtcttttcaggtaaatcttttcgcacagtatataaaaaacgagatatatctaatttctttcctctgaaaaattgcggagaagaaatgtaaagttcttctttcgcacgtgtaatggcaacataaagtaatcggcgttcttcttctaacgcttcagaagtttccgtaacacgatcatttgcatcttttaaagaagaagtatgaggcaggattccatcactcgctccaagtaaaaagacacatggaaattcaaggccttttgcgttatgaattgacataagtgaaacggcatctttttgcggcattgtttttaatgcttccatttctttttgaccttgaatcgcctcgtcgataaattgtaaataagctggaatatcggtgaaacgagttgcagactccattaattcttccaacatttcttcttgtatgtctttatgcattgtaaaggaagaacgatcgttattttgtaagtactctaaatattttcctttaccatgaatgatttcttttaatgcttttttcggttctaattctttaataaacttaataaaatcgatgcgctcatttacctttttcacttgaaaaggttttaagcttggatttaatagtaagaaatgaagaagagaagggaagcgcccctcaccatatttccattgttcacgttcaataaatgaaatacaatcatcacgtccgatatacatcgtcggcaatatgtttgaaagtgattctagtcgaaacggctcaatcacgagtcttaaatgatctaatacaggcttaattaaagaatgttcataaaatgattggctcgctccgtgtttaataaacgggattttatgaatggtaagctgatcaagtaacgaacgacttacagaatgtgtgcgatacagtaaacaaaaatctttaaagttacgttcaccactctctactttttcttgaataagctgcaaaatttgatttgcttcatcaagagtcgtagcaggtcttgcataaaaaggttgtacaccttcctcacgaacagagtatagctctttatcaaaacgttcttgatttaattttataacttcatttccaagcccgacgataaagggattggatcgataattcgtatttagtgcaatgattgttgtgttatcaaattcttttggaaaagataaaataatttggtgacttgctcctcgccagccgtatatcgcctggtcgtcatcacctgcgataaataaattatttcttggcgtggctaacaattttacgatttcatattgtgcatacgatgtatcttgaaactcatctacttcaatatagtgaaaacgttgttgtaattgagttagtaaaggagcattattttctaacatataatatgtttccaataagatgtcatcgaaatcaatataattgtatctttgttttacctcttcaaaacgttcgtatacttctttaaattcttgttcgactggtgttttcgcttttacatctttcggacgatttaatttgtttttctcaagtgaaatcatcgcgagcatcgtttcagcatcataatcgtcttttaaacgcaattcttttaagattttctttatcataatttgtttatgtttttcatttgctaaaatttgctgattataaccttgactacgaagtaattttaagaaaacagagtggaatgtaccagcaactacgtagctacttgctgcatgattcatacctggtaacttcgcaacacgacttcgtatttcttcagctgctttttgtgtaaatgtaagtaataaaatatttcgtggatgaacttgttttacatttactaaataaccaacgcgagttgttaaaacagatgttttcccgcttccggcaccagctagtgtaagaacaggaccttctgttgtgcgcacggcttctaattgtttttcgtttaaaaaaacattttgttgttcaagagcgcggaaataagccgcatctacatcttcttccataattaaatgggtagatgttttcggaatatgatatgtcgcacgcggaatatcagcgtgtgttaacgatttttgtgaaaatttttcttgtgtcatatgttcaccttcaaaactatagcatcaacatttaactttagcggaagaaaaagaaaatagcaatgtaaaaaaacaggagggatcacctcctgctttcaaattacaattcttttatcattacgacgtgcgggatattcgcttccataaatacatcagaacttgttacatatccaagttttttatagaaatcttcggcatgtgtttgagcgtgaagtttcaatttcggtagcgaattttcttttgcatacgcttcaagagaatccataacaatttttccaatcccttttttgcgatgggaatttagcacgcaaatgcgttccatttttcctataccatcaaggatgcgaaaacgtccagcaccaactggaacatcattgtcatatataacaacgtgtgttgaaatttcttcaaactcatcgtactcttcttcagcagagacacgttgttcatttacaaacacttgtttacgtacagagaatgcatctcttagttgttcgtccgtttgtacaatctgtgcgtgcaaattagttgttcccctttccaagacggaatgtttcgtgtacagtccatgttccattttctaattgatatagaagatggaaacgatcaattggttgttcgtaatagaaatctttcatacgtaatcggcccaacacatcagcatgctctgcatctgataagccttgtccgattgttaaatgaggtacgaaagcatattcgcgttcttgcgtgaataacccgctatgcatttcttcatttaagaaagtaagttcaggtgttttttctactttaaagtaaaggacgttattaacaggtgcgaatgaaccaactttcccaacatgaagggtgaaagggttcgttttacttgcgattgtatgtaactcgtttacaatcgactctaattgttcatcttgcgcctcaaagggtgttttcaatgtaatatgtggcggaactaatgcgtagtgcgggtcataacgtttacgcaatccgttcgctttatcttgaatcattttagatggaaaaattacaatgcctaatttcatgttccaattcctccctttgtaagtctagttagattttgagataaataaatctctttatctattatatcaaattattctgaatactgctctctattatttcattgatagaatatgagagaaggctttcggtaaatcagtctgccaatatttccaagtatgattgccttcaaattcctcataatgcgtgatgaagtttctatctgtaagaagtgtatttaactcacggttcggccctacgaaatcagatacttgtccatcagtacgctttacagccgtttcttctgtaccgatgacgtgatacagttctaacgcctgtggatctttgaattcttttgctaagttcatcactgtctcatccacaaatggtgattgcataacgactttaccgaatgtatgcggatacataagtgcagtcataaaggaaactgttccgccaagagaatcaccaattaaaacacgaccttttcccatttggtacgttggataattttcatcaatatatggtgcaagttcatgagcaaggaaacgaatatatgcagcattttttacttcatttgggaaatatttttctttacgatcatgtacatttttatatggaataccgacaataattgtacggtcaatttcttcggtttcacgaaggcgctcaattacacggtgcgctttaccaagctgaaaataatctctaccatcttgtgcaattacaactgtatgtttgtgcagtggtgtgtaatttactggtaaataaacgagaagtgtaacatcttcttgaagtgatgcgctataaaatgaaatttcttcaattctccctattgtttgactcatgtagatccccctaaataaaaatttactgtaacgattgtaagagcgacgcttgtagtgaaaaggaaagaaatattcactaattggtgccttaatttctattttaccataatgatacgaagaatctaaaaaattagtatttaagttgcgaaagaaaacggatataatgaagtgggatttttgacaggtgagaggggagacaggatttgaaacaagaaaaatcaatcgcactaccattagcaatttctataattgccatttcctttgcagcagtttttgtaaagatgtcctcagcaccatcttcaatattaagtatgtaccgcttatggattatcgtacttattatgctgcctatcgtatggaaaaaaagagaggaatttaataggattcaaatgaaagattggggctttttaattggatctggtttctttttagcacttcattttcttttatggtttgaatctttaaagcatacaacagttgctagttcaacaattattttggcacttcaaccaatcgtatctttagttggaggtttttttctatttaaagaaagaacaacatattcagccattgcaacgatgggaatcgctattttaggagtaatgtgcattggttggggagatttaggtttaagtaagcaagcaatttatggtgacatattatcctttctaagtgtaatagcggttgtcggttatttatttatcgggcaaacgacagtgaagaaagtatcgcactggatttatagctttacagtctttgcgttcgcaggtctttttatggggatttataatgttatattacaagtaccctttacaggttatacgaagtgggattggactgtttttcttttacttgcggttgtgccgacagtgtcacatgtaattaataactggctattaaattatgtaaatgcaacgacaatttcaatgagtattttaggagaacctgttggagcatctatacttgcgttcttcttacttggagaaaaattaaatgcaatgcaaatgatcggtagcatgctcgtattgtttggtgtatctgttttcttactgcagcaacaaaagcgaacagcaaaaaatgtcgtaaatgagccagtgtatacacaggaattatagtgttaggggagaaaagagaagttgtgatacttctctttttgttttatagaaatacgggcgtagaagggggaagaaaatggaagagatattaaagaagtatatgaatagatttacaacactaagtgaagaagagcagcaaatgattctcagtgaattacaaattgaagaatataaaaaaggaacagtgctcctaagacaaggaaatgttccgttaaaatgttattttgtattaaaaggatgcgttaggcaacatagtatagatgaagcagggaaagaagttacatcaaatttttatacagaagagcaggcaatttcgaatttcaaccatcataaacaagataaatcttcatcatatacgttaacgtgtttagaagattgtactgtagttgttggtgatctacatagtgaaaaggacatgtataataagtattcacaattagaagaaatgacgcgtaaaatgatcgagtacaatttcggtgaagtacaagatgaacttgctgtatttatctcatcgacaccagaagagcgatataaaacattgttacgaaaacgcccgtatttaattcatcgtgttccacaatatcagctagcaagctatcttggcatgacaccagaatcattaagtagaattaagaaacggcttaattagagtgtttaccacctttcaatagtagccatatcgcaagtcctaattcacctgcaatcataggtaattggaatagtgattgtatgagtgaaatcattgtatcgtattgtgtaaacattgtattcatgacgtgaattagcatataaccggtagcagcaatgaacagcagtatactaataaactttggtatctgtttagagagaaaagctacatagcctaaaacgaaaagatgcaatccaaaaatgatcaatcctacagaccaaatgtattcgaatgcactgagaaacaacattgtatatgtttctggatttgcaattgtattttttgaaagcaataatgccaatattagattgaatatagcaatcccaagtatagctgtatacataagacgaagcaaagcggctagtaatgagaggctagtatgaattggttttagaaagaaataaagagcccacgcagcgacaatatcagtgataaaaatgataatccacccaaaaacttccgctttgaaaagtgaatttgaagtttggatattatggaatgttgtactcgcatctccttgtataacgaggtttccatgaacaaaaccgtaagagaaaaatgcaatgaatgccataacaagaagagatgtgctagcaaataaggcgtactttcgttcagtcataatatgtcctccttttctaatattgttttcattgtaatagggaagaggaggagattcattgacttaaatcaagacggggaaagtttagtagagtttccatcaaaaaaaatgtatggttatatccaattttttattaaccttgtaaaaagtaaaaactcaaatattgaaatcaagtaaaagagtggctacgaagccactcttttactttggatttgtcatataaggttgtacatgaatgacacataggtcacgaaatttgccttcagcagttgtgacaattacgactgctttacctgcactttttccagtaatcgtcacggtgtcaccttttggatatatggtgatgatatcagaattcatatttgaccaaataagctctttattcgttgcttgtattggtaaaatggaagctgataacacaatgttttgtcccgtttttatttttaatttatgtttttccatatgaacaccgatgactgaaataacagaaggagcaattgaaattttaggcgggttaggttgcatgtttaaacaagacgcagaagtatttgtgataggtgaaaattttcgtgtttgttgttgctggaaagctgctaacatgttggagtcccctttctgtataagtgctgatactcatactataaaggagtagtgttatgttaaatttaacgaaacataaagaatttgttaaatttgataaaaagattgtcgaactgtaaaaaatctctgctgttatgataacagcagagatttttttataaattatgacgatgttgtttttcgaaatcctcaaattgctctttaacttcttttgaaggttgtgttagtaaactaacaattacgatggctagtaaactaatagcgaaacctggaatcatttcatataagaaatcttttaagaatttgaattgagtccatataataacagtaacggcaccagaaatcataccggcaagtgcgccccacttcgtcatacgtttccaatataagcttaataaaatagcaggtccgaatgaagaaccaaatccagcccaagcgtatccaacaagagctaaaatcgtatcattttgtttaaacgctaatgcgcacccaactaatgcaataacaagtacagccatacgaccgacaaatacaagttctttatcagatgcagaacgtttgaagaatgtacgatataaatcttcagttacagcactagaagtaacgagtagctgtgatgaaattgtactcataatcgctgctagaatggctgctaataaaaatccagtaataagtggatggaataaaattttcccaagttcaaggaaaattgtctctggattagataatgtcaactcttgttgtgaatagtaagcaataccaataagaccagtaaacatagctccaacaacagagaaaatcatccagctcataccaattcttcgtgcacttttaagttcttttacagaagaaattgccataaagcgtacgataatatgaggttgtccgacataaccaaggccccatgcgaatagagaaatcattcctaaagtagaggcacctttaaaaatatctagacgtgttggatctacagatcgaattgtatcaaatgcaggtccaagtccgttcgaattcataattgttacgataggaacaagaataagagcgactaccataatgattccttgcacgaagtctgtccaacttactgctaagaacccaccaaataatgtgtaagctacaacaacgcctgcaacaatgaataatccaacgtggtagttcataccaaatgaattttcaaataatacagcgcctgaaactaatcctgaagctacatagaaagtaaagaaaatcataataacaagtccagatactaaacgtagcatatgagatttgtcgtggaaacggtgttccaaaaattctggaatagtaatagagttatttgcaatttctgagtaggtacgtaagcgaggagcaacataaagccagtttgcgtatgcgcctagtgttaggccgatcgcaatccaactactacttaatccaacgctaaacattgcacctggtaatcccattaaaagccaaccactcatatcggatgctccagcacttaatgccgttactgcggggcctagtgtacgcccgccaagcatataatctgttaagttggacgttcgtttataggcgaaatagccgattactaacatcccgagcatgtaaatagagattgaagttaaagttaacatctgcgtactcatgaagttccccttccttttgtcatgtcttttgatgcgttatgcatatttatcccgcataaacgggcagtaaaattcccaccttaaaattggctgggcaaggaagttaggtgggagagcaactgcccgtaaatgcccgattgatttaactaataatcagtgggatgaacaaacccctactgattaaagtttcactttataatctatcatgattattctgaaaaatccatatagaaatacgaattttcagaaatgtaagcgttttttgatgtcattttacttttttaatatataatattcatacaaaaaaccttatttttaatagagtatttattatatttacataaaaagaggttgttttgtcaatataatattgaaaggaaagaaaaataaaatttttgaaaaagtattgacttgtgaaaaaagtcaggtctataatgagtgcaacttaaaaaaatgcaagcgttgatgaagaagagtacacatgatgaacatgtcagagagctgatggttggtgcgaatcagtatggaattgatgtggaatgggcttcggagcttccaaaccgaaacgaaagaagtaggctttggcgacatgatctcatcgatacaagagacacgtattgtttttgatacggtaaagtgcgttacatttgtaacgaattaaggtggcaccacgggagtacccgtcctttctataggatgagtactccctttttgtgtataaaaaattaaataaatgaaatcgtttaagtaagaagagtacgtatattggagacgttacagagagccgggaataggtgggagcccggtacggtgccgtatacggaatgggcttacgagaggtatgctgaacaattattttcagtaggcaacccgggttccgccgttacaaggataaggtataaattttgtacctgaacaaagcgggatgcttttgcatccaacacgaggtggtaccgcggtatatttatcgtcctctacatattttcgatatgtagaggacttttttatttttcagagcgaggtgaaggacatgatgacgaaagaagaatttataaaacaaaaaagagagagaaagacatttttagtaatcactgaagaagaaggagatagcattacgccaatttctttatatagacgtatgaaagggaagaagaaattcttattagaaagttcacagcttcatcaagataaagggcgttattcttacttgggatgtaatccttatggagaagtgaaaagcgttggtacgggagtggaacgaacgatttacggccgcgcagaaaagttacaaggtaacgtactacaagtgttagaagaagtaattgcaccatcacaagtagacagtccatttccattttgcggaggagcagttggttatattgggtatgatgtcattcggcagtatgaaaacattggagcggatttacacgacccattaaatattccagaagtacaccttttactatatcgtgagtttatcgtttacgatcatttacgccaaaagttgtcgtttgtatatgtatgcaagcaagatgattcagcagattatgaagaagtatacgaaaggctgcgagtatacaaagaggaagtgctacaaggagaagaagctgaagtaaatgcaatacaatccacattatcatttacttcttctataacggaaaaagagttttgtgagatggtagaaattgcgaaagaatatataagagcaggagacatattccaagtcgtattatcacagcgtttacaaagtgaatgtattggggatccattcgggttataccgaaaacttcgaattgcaaatccatcaccatatatgttctatatcgattttcaagattatgttgtactcggttcttcgccggaaagtttactatcagtaagggaggataaagtgatgacgaatccaattgctggtacaaggccgagggggaaaacgaagagggaagatgaggaaatcgcaaaagaactgttaggcaatgagaaagagcgagcagagcatatgatgcttgtagatcttgggcgaaacgatattggtagagtgagcgaaatcggctcggttacgatagataaatatatgaaagtagaaaaatactctcacgttatgcacattgtatctgaagtttacggaacattgcgaaaacaaatgggcggatttgatgcgttagcgtattgcttaccagcagggacggtttctggagctccgaaaattagagcgatggaaattataaatgaactagagaatgaaaaaagaaatgtatacgctggtgcagttggatacgttagtttttcaggaaatcttgatatggcgctcgccattcgaacgatggtcgtaaaggatgaaaaagcatacgttcaggcaggagcaggagtcgtttacgattcagatccagtagctgaatatgaagaaacattaaataaagcgagagcgcttttggaggtaatgaaatgattgtacttattgataattacgattcgttcacatataacttgtatcaactgttaggcgaacatgaagaagaaattgtagttgtaagaaatgatgaaataacgatagaacagttagaagagatgaatccaagaggaattgtactttcaccaggaccaggaaaaccagaggatgctggcatttgtatcgacgtcatccgtcatttttataagaacgttcccatattagggatttgtcttggccaccaagcgatcatatctgcatttggaggagacattgttagagcagagcgtattaaacacggaaaaacatcgcgtgtgaaacataacggaacgtcaatcttttcatatgttacacagcccctaacggcgatgcgctatcattcccttgttgcagagcaaacgagcttgccaaagtgctttgacatattagcgacagcgatggacgacggagaaataatggcagtccgtcacaattattatccgctcttcggattacagtttcatccggaatcaatcgcaacagaagaaggcggaaagttaatccgtgcctttttaacagaagtaaaagaggaggaaagagtatgaacaactatcttcgtaaattagtggagggtcaacatttaacagaagaggaaatgtataaagcaggactacttttattaagtgaaaacatattagaaagtgaaattgcagctttcttagtcttactgaaagcgaaaggtgaaactgcagaagaaatatacggtctcgttcgagctcttcgcgaaaaggcattgccgttttcgaaccatatacaaggagcaatggacaattgcgggacgggtggtggtgatgctcaaacgtttaatattagcacaacatcagcattcgtactggcaggagcaggtgtaaaggttgcaaaacatggtaatcgtgctgtttctagtaaaacaggaagtgcagacttattagaagaactaggtgtaaatattagtagtacgccaaacgaaattgattatttactagagcatgtaggtattgcatttttatttgcaccagcgatgcatccagcactaaggcgcattatgaaaataagaaaagagttaaacgtgccgacgatctttaacttaattggccctttaacaaatccagtgaatttagaaacacaatttgtcggtatttataaacgagatatgttattaccagttgcacaagtattacaaaagttaggccggaaacaagcgcttgtcgtaaatggaagtggttttttagatgaagcgtcattacaaggggaaaatcacgtagtccttttaaaagataatgaaatagtagaaaagagtattaatccagaaaagtatggtttttcaagagtgaaaaatgaagaaattagaggggggaattcaaaagaaaatgcaaagattacgcttgaagtattgagcggagaaaagagtgtttatcgtgatacagttttattaaatgcaggtctagctcttttcgcaaatggaaaaacggaaacgattgaagaaggaattaaactcgcggcacatagcattgactctggaaaagcattagccaaattaaacttattaattgtagcaagcaacgaaaaattagaaagggtgaactaaagtggggacgattttagataaaattgtagaacagaagaaaaaggaagttgcggagttatatgaaatatatacaccagtaaaaacaaaaagaaagacacattcacttgtagaagcgttacagcagtttactgtcattgcagaagtaaagcgagcatcaccatcaaaaggagatatcaatttacacgttgacgtacgaaaacaagtgggaacatatgagaaatgtggtgcaggagcagtatctgttttaacagatggtcaattttttaaaggatcgtttcacgatttacaaacagcaagagaagaaagtaacattccgcttttatgtaaagatttcataatcgataagattcaaatcgatagagcgtatgaagcgggagcagatattattttactaatcgtagcagcgttaacgaaagagaagttaaaagagttgtatagctacgtgttagaaaaaggattggaagcgattgttgaagttcataatgaacaggaattagaaactgcgattgtattaaatccgcacgttattggtattaataaccgtaatttaaaaacgttcgaagtagatttaagccaaactgaaaagcttggaaaaagattgaatgaggagaaattactttggattagtgaaagcgggattcattcaaaagaggatattattcgtgttaaaaaagcaggagcaaaaggtgtattaattggagaggcacttatgacatcatcttctattagtaacttttttgaagactgtaaggtgaatatatgaaagtgaaaatttgcggcatcactgatatggaaacagcaaaacgtgcttgcgaatacggcgcagatgcactcggatttgtttttgcagaaagtaagcggaaaatcactccaaagagagcggaagaaatcattcaggagcttccagccaacgtgttaaaaatcggtgttttcgtaaatgaatcagtagaagtgatccagaaaattgcagatgagtgcgggttaacacatgtacaactacatggagatgaagataattatcaaattagaagattgaatattccgtctataaaatcactaggagtaacttcagaaagtgatatgaaaaatgctcaaacatatgaaacggattatatattgtttgatagcccgaaagaaaagtttcacggaggaaatgggaagacattttcatgggaactacttgtgcatatgccagaagagttgcgagagaaaacgatattagctggtggattaaacgctcttaatatagaagaagcgattcgaactattcagccatacatggtcgatgtaagtagcggagtagagacagaaggaaagaaagatctaaagaaaataaaacaatttattaaacaagcgaaggagtgttccaaatgaattacgcatatccagatgaaaaaggtcactacggtatatatggaggacgatacgttccagaaacgttaatgcaatctgtattagaactagaagaagcatataaagaagcgatgcaagatgaagcgtttcaaaaggaattaaatcattatttaaaaacgtacgttggaagagaaacaccgctttatttcgctgaaaatatgacgaagtattgcggtggtgcaaagatttatttaaaacgtgaagatttgaaccatacaggagctcataaaattaacaatacaatcggtcaggcactacttgcagtacgaatgggcaagaaaaaagttgtcgctgaaacaggggctggacaacacggagtggcaaccgctactgtatgtgccctactcggattagaatgtgtcatctttatgggagaagaagatgtgagacgtcaaaaattaaatgtgttccgaatggaattactcggagcgaaagtagaaagtgtagcggcaggtagcggcacattaaaagatgcggtaaatgaggcgcttcgttactgggttgcacacgtgcacgatacgcactacattatgggatctgttctcggaccacatccattcccgcaaattgtccgtgatttccaaagtgtaattggaaatgaaacgaaaaaacaatatgaggagttagaaggaaagttaccagaagcagtcgttgcttgtattggcggtggtagtaatgcgatgggtatgttttatccattcgtacacgatgaagaagttgctctttacggcgtagaagcagcagggaaaggcgttcatacagaacagcacgcagctactttaacgaaaggaagcgttggggttttacacggatcgatgatgtaccttctgcaaaatgaagaaggacaaattcaagaagctcattctatttcagcagggctcgattacccgggtgttgggccagaacatagcttactaaaagatattggccgtgtttcttatcattcgattacagatgatgaagcgttagaagcatttcaattattaacgaaaaaagaagggattattccggctttagaaagctcacatgctgtcgcatacgctttaaaattagcgccgcaaatgaagaaagacgaaggacttgttatttgtttatcaggccgcggggataaagatgtagagagtataaaacgttatatggaagaggtgtaaaaaatgggagtagaaaaaattaaagcagcgtttgaaaatggtaagaaagcatttattccgtacgtaatgggcggagatggtggctttgaaaaattaaaagaaagaattcgttttttagatgaagcaggagcgagcatcgttgaaatcggcattcctttttcggatccagtcgcagacggtccaacgattcaaagagcagggaaacgagcgctagatagcggtgtaacagtaaaaggtatttttcaagcattaatagaggtaaggaaagaagtgcaaattccgtttgtactcatgacatatttaaatccagtacttgcattcggaaaagaacgattcatcgaaaactgtatagaagcaggtgtagacggcatcatcgttccagacttaccgtatgaagaacaaaatattattgcgtcgttacttcgagaggcaaacattgcgctcattccactcgttaccgtaacgagtcctattgaaagaattgaaaaaattacgagtgaatcagaagggttcgtttatgctgttacagtagcgggcgtaacgggagtacgtcaaaactttaaagaggagattcatagttacttagaaaaagtaaaatcacacgtcaacttaccagtagtcgctggatttggcatctcaacaaaagaacatgtagaagaaatggttacaatatgcgacggagttgtcgttggaagtaagatcattgagcttttagaaaatgaaaagcaagaagaaatatgtgaattaatatatgcaacaaaacaaaaagaagaggcgtagtctcttctttttgttttgcgtaataaatgttaaaatatacagaaaatacatataatttagagggtgagaaggcatgctaagacgtaaactactatatctatttttaactgtaccgctatacgcttggctcattagcatgacgaaaatagagttaatggctctatttttagggtatgtattcatcttttccaacttaaatcgcattcaagaacagtctattttagaaatatgtctattttcgattagtatagaattatttagtatcgtttcgattgtattattaaacgaattatttctacggattcattcatttacattaatgaaattttggaatattatattgcaagcaatatgtacttacattgtgtttgttgtgttgaaagaaatagtcggaaagcagaccgtttttcaggataatagaaaatgggagtgaatgaaaaggagccgtttggttccttttttgaatctgttgtaaaaacaattgaaaattatagtatctgttatataatagttaaaaattgtattttaaacgaaatgagatgataacatggccatattgttggcacttatcccaattatgatgattttcatttgtttatttttatttaaacaaacgtcattaaggtcctcgttaatttcttatgctgtgtctgttggaatcgttttactctcgccaatgtttcaattagggataagtgaaactgtgcacgcaacgattaaaggatggttaatttgttttattgtcgggtacgttttatttttcggtatttttttatttcacctcatgaacaaaatggggtacatcgatcaagtagcacgttttctagaagcagttactcaggatcgcttattacaaatgctgcttatgtgttttggcatttgcccgcttattgaatcagtaagtggattcggtattggcttcatggttgcagcacctatttttctttcactaggatataaaccatttcaagctgtactactctcattcatcggcttactagctagttcatggggcgcaatggcaactggtacgattatcggttcgcagctaataaatatgcctcttacaacatttggcacaaatacagcgctattaagtattccgatgtttgcttacttcgttattctttctttacacgttgttggcggctggcaagcggttatagaaaagtggaaagaaggagtagggttctttctattattttctctcggaatctatctttctaatgcgtacgtaagtgttgaactagccgggatattaagttctatcgttacgattacctttggcttttttatcattaaattaaaaggaaaaagtgggcaaaatcttataacagaacatgcggctgcaacggagagagaagtatccattataaaaattattagcccttatatatttctaacagtttgtattttactttctcgcctcgttccagcattacatgatttgttcagatcatatgcggttcttgatttgaaatcatactcttacaaactagagttactatattcaccaggattttggctcggtatgacttgcttatttactattattttcttccgcatcccgtctaatattattaaacaatcactctcacaaacgattaaacaatggattccatttgctattacgacgacaatgtttatcgccatttcagaactaatgggtgcatctggcatgcattcattactcgcaaagacagctggtgaaacatttggaacctttttcgttttcgttgctccgtttattggcgctattggtggatttttaacaggtagtaacgcaggatcaaatgcaatgtttataaaactacaaatgcaaaccgcacaaaacgtagcactcccgtggcaatatgtcacaacacttcaaaacaccgcatcatcagtagcgacaattgcttgtccatcacggattacactaggtgcttacttatgtaatatcccttaccgtgaaaatgaactattaaagaagacgacgttaatgatctttggtgcgattttgcttgtagtggtagaagttattgtttggtatatgttgagaaattaaaaatcctcctaacataggaggattttttttatgagtggataatgatttaaatatgaatagcttctactaaatgaataggagatgaaatgtatgcccctaaaaaactacggtgtgttaaaaggtacagttatacaatcaaagattggaaaagggaaaacacctcattatcaagttcatttacagggcgagacaggagtaaattatcgtattgcaattaacgtaaaatcgcaaagctatccgtcagaagttttatattttgcgagtaacaatattaagtcagaggcgattcatattttaccgacattaccattcgattttacagaaataaaaaacaatgaaccgaaagtagctttagattatgtaagaggaaatctatttgactcaaatcaaatgattcctttgcctcccgaaaaagcaggagcagataatgatttaaatgaaaaaatagaacgttatataaaacgagcaatagaagaaaaagcaattatttacgcgtttggtgaaagatggggaccagaagaaaatacaccagattcctattttcatttcaaaccaggaaacggtatacatgatattcatatgaatcaagggaatgtagaaaaatggcaaggtgatgatggcatatggcaagatggaggaatactcattcactttgaaaaggaagaagaatggatcggtatctttcttgccttccaatcacagtcatggtgtaccgatgaagaggggcatgctcgtgtgcctgttgagcattgtgattataaggggaataattaataagaagagggcgttcaaaaagaacgccctcttcttattttataaaacgaaaaactaacgagtgtagaaagacaagagaacagcagtgccacactagaaaacgcaatgagatacatattatatttcataacctgtccaattagctgattactgtcgtattgaaacagtcctgctattatgttgaataaaaataacacgataaacatgacgacaacaccgtctattgatcctttaatgtctggtttacttaaagcgatatgcgcggaaatgcaaatggcgataaataaaaataaccaaaaggaaggattcaataaattgccgattgtaaataagcttttcaataatacaaacgtcgacaagagcatgttttggatcatttctacattaatagaagtagaagcaatcgttttttcgagagttgtattaaataaaaaatatgattctggtacgaaatagcgcattaaaaggattaacgcagtaataccagaaataataggcccaatgccgatgaagaaattcccaatccgttgatacacacttttttgattgtattgatgttgtacgtaacctaaagccccttgacttgtatctgtcgggaagaactgcgttgctacaatcttatgacggaacagcacgcacataatggcatgtccaagttcgtgaataggaacaccaatccaagccgttaataggaatccttttcgtccaaaagctctcgaccaatacatccgtgtgagagattctaaatagcctaatagaaatccaattacaatgataacgccaattaaagataataattggattacgcttgtaaggagtatttgaaaaattgagtttaccaattccattgccagtcatccaatctgttaaaaatattatttattctgtttcataatagcattttttttcaagattactagcacatatattttctttcggaagaaggatttcagaatctttttcttgtagtcatgttttatgtacaaattcatatattgaatttgtaacaccctatacggtatatccttaaggagggataagagaatgaaatgtccgtcatgtcatacagaaaatgcagcggaggcaaaattttgcgggaattgtggacattcgttaacggaagaagtagtggcaagtagtggccaagaagaagggccggaacaagcacgtgcggcacaagcaaaggaagctcggcaaaatgaaacggtagagcaagcgaagcggtttgcgagcggctattttcaattttttaaacatgcattacaagcaccgacagcgattatgcaaagcggcgctattgaagtacgaaatggaattgtaagtcttgttcttatttgttttttaggagcatgtattttttatagaatgatgagtgcagcatcagcagttacgagaacatttgcaccagatatatctactcccacgttttttgtagaatctataacggtctttttctttttattaattttaactttatttgtcggatttattatttttgtaagtggtaagatgatgaaatcatctttttcgtttcttgaagtattcggtatatggggaacgatagcgacgccggctattgtcatattagtcctttcttttctttttagtttcttattaatctttttcttaccgatattattatccgtagctgcaacttatatagggattagtataactgtagccgtattaaagctagacaatggcggattagatctcgtttacacacttattattgcaaatgttttaattggaattgcaacattcattgtactttggtcttacattagcacgataattcaagccttaacacagggaataactggcttctaatgaaaaggtggttgactggatgaatgtatgtacaaagtgcggagttcagtttgaagatggtgtgcagttttgtcaaaactgcgggacgaagaggggacgttctgtagtaaagaagaacatgagcggtggtgtaaaagttggcattacactgttagcgctatttgttatagcgattattggattgtatttgtacggattgtcgtattatacgcaggtggcacaagtagaccggatgattacgattttacaagagagggacggagagaaattagctgagatcgttacggcagatgatccatcggttatgataacgagagagagcgtaacgcctctattttcatatataaaagaaaatccatcttacgtgaatgaattaaaagaatatttgagacaaggtgaaaaacaacgggacggaatagaaagagctgatttttcattaacgaaagacggaaagtatttctttatatttgatcgatataaattgaaagcgaagacgtactatgcaactttgctttcaaatgaaaaagacgtatcgttaaaaatgaacggaaaagaaattgataagacagatgacaaaaagtttgagaagcaatatgggccatttcttccgggaaatcaagtgtttcaatcagaatataaaaatgactacgtaaaactatcacgtgaggaaaaggttgtacttatgaaacaaagccaaaataacgtaacgatagatttaacgttgcaaggtcaatatattacagttcaaacgaacgcgcctggtgcaacattgtacgtaaatcaaaaaccagttacagcgctcgcaggagaagaaattacatgggggcctgtagcgactgatggaagcgcgaaaatttatttagaacgaaatggagaaaatggacgggaaacgacaaaagtagagacggtaacggcactttcgtcttataatcttccattccaaacgaaaagtgcagaaaaaacagttgtttataatgttactccaacgcccgcaactgggtatgtatataatggtttcatctttcctgatagtgatattcgaaaattaacgagcacagatttaacatatttatcgaaagaacagttgaaaattgctagaaatgaaatatatgcaaggcatggacatatttttcaaacgaaagatatgcaagcgtattttgcaaaacagtcttggtatagagaaaatccttattttacaggaaagttaacagatatcgaaacttataatattgaactaattaaatcaagagaatagagcgcgggaaaaaggtacagtgtatattactgtaccttttctatcgttatttggctggacgaggttccctagagaaaaagatatgaaagagaaatgtgactttacttgcccctcctgatgtactggcttgcacatcagataaagaactagacgttaaagcagcttcagaatgaggagggacgattattttaagagcatcatctgattctgaggatgcagtaactgttattgtatcgtcagaaaaatttaaaattttaacagtaccgactggaaagatggccttgcgagcatgtgatgaagaagcgaagcgggtagctttccagatagtttgtgagaaagtgtcattgtcagataaccaagcacgagcactgtataaagttacactaaccgtaaactcctgttcaagcgggagggcgggtttcggttctatcggttcctctggaagctggacgagaaggccggcgcacatgtatgtttcacctactttcaactggttactgttataggatattaaacatgttgtttataagacacgacagttacctattcaggcataagtttgtgcacaaaatttgaagatgaaattctctttctttacaatggaagtaggtgttatttctataaaatatggaaaacgtaaagagtatgtaaaaaagaaggagtggtaaagtgaactatgtcattattggcggagatgcagctggtatgagtgcagcgatgcaaattgttagaaacgatgaagatgcaaatgttgtaactttagaaaaaggtgaaatttattcgtacgcgcagtgtgggttaccgtatgtcattagtggtgctatcgcttcaacggaaaagttaatcgcgcgtaatgtaaagacgtttcgtgataaatacggaattgatgcgaaagtacgacatgaagtaacgaaagtagatacggagaagaaaattgtgtacgcagagcatacgaagacgaaagatgtctttgaatttccatacgatcgtttattaattgcgactggcgtgcgtcctgttatgccagaatgggaaggacgggaattacaaggtgttcatcttttaaaaacaattccggatgctgagcgcatattaaaaacgctagaaacgaataaagttgaagatgtaaccattattggcggcggtgcaattggacttgagatggcagaaactttcgtcgaacttggtaagaaagtaagaatgattgagagaaatgatcatatcggtacaatttatgatgcagatatggcggaatatatacataaagaagcagataagcatcatattgaaattttaacgaatgaaaatgtaaaagcattcaaagggaatgaacgagtagaagcaattgaaacggataaaggtacgtataaagcagatcttgttttaatgtcggttggagtgaagccaaatactgattttcttgaagggacaaatatacgtaagaatcataaaggagcaatcgaagtaaatgcatacatgcaaacgaatgtgcaagacgtatatgcagccggtgattgcgcaacacattaccacgttataaaggaaattcatgatcatatcccgctcggaacgactgccaataaacaagggcgacttgctggactgaatatgctggataaacgaagagcatttaaaggtacgttaggtacaggcattattaaatttatggatttgacactcgcaagaacaggattaaatgaaaaagaagcgaaagggctacacatcccgtataaaacagtcaaagtagattctacaaatatggcgggctattatccaaatgcaaaaccactttacttaaaattactatatcgctccgatacgaaacaattattgggcgggcaagtaattggagaagaaggggtagataaacggattgatgtgatcgcaatggcgcttttcaataaaatgagtattcacgatttagaagatgtcgacttaagttatgcaccaccatataacagcgtgtgggatccaattcagcaagcggcaaggagagcagaatagcactttttaaagtgctatttttttgttaaaggggaattatcatttttgtcgaatgaagaggatcgggaaatagttacatatgaggaaggggagtttttttatgattgtagcacttcaaaaggttcaagaatcagaaaaagaaatattacgtaatttgtacgctttatatcttcatgacctttctaagttcactatgaatataactatcggagcgaacggattttttgaatacgaagatttgcatatgttttggaaaaatgacggaatcacgccgtattttataaaagttgatcatagtattgtaggattcttattactactggaacgtccgtttttgaagaaggaaaatgattttggtattaatgatattttcatattgaatcaatataaaggaaaaggaatcggtaaacaagtagttgagaatttactagaagagaaaagaggacaatatttcgttatcgaacttctaaaaaatgtaccagcagtgtcgttttggaagaaagtatataaagaattaaacattgaatttgatgagagagcgcagctaattgatgatgaagaatgtcttgttcaaacgtttaaaatttaatgaaattggtgttccttttatattactttgaaatttaactttatcctgctatttgcgggcagtaagaccccactgattaaagtttcactttattttgaatataccgtttccccttgaaaacatattacgtatcgcttatattttcatatagtatttattttttaaacgaagcaatgaacgaaccagggggcgcagtatggcaattaacatgaaaacaatcgaagaatggattgctgaatcaaatgcaagacatgaagaagactttggacacgttgtggaagaaatgaaagaagtatgtgtcggacttgataacgcgacattaatttatacgaaaaatgtattttgtttcggtaaaaaagtagaagtctttttcttcttccaagaccatgtcgtgattggacaagaaaaagacgaatatgttgagattgaaaaattaaagtatgatgacattacaaatagtaacttaaaaacaaatgacaaaaatactacgttagaattaaagtttgctaacggacaatctatcaatttagatagtttaaatgataactacggtacgaaaaattggttatttgctagacaaattaagagtatttttaagttaatctagtaaaaagagcagacctcaataaaatgtaccctatagaatagacacttgaaaaaagtctattctatagggtatttgaaaatgtacatatttattcaagcgttaatgtacatatttaagttagcatttatatttttaagttcaattcccctactcgttccttatcttcatcaccaacccaacaactaaataattcgaaatagtctctatcttccaaataaccttccataaagttaaaagtttttctttcgcttctttttttcctttacattttgccactcgacaagttcaattccccaactagttgaaacctcatatgtgtaatttgtttggaaatgataatcttgtacaatttcaagcatactttcatctgaaaaacacggtccaaaaacaattagattattagaatccggatccgttaacggaatttctacattacagcctatgtaacttgctaaactcattttatactcctccagtattcgtataaaaaatacttcatagtatatttatttacttaaatataaaatccctgcctaaacgaaaaagttttaaatttttatcgtttattaaccatctataactgaaaacatatactatgatgaacgaactcacaaagcataagaaaagagagcatttacaacactctcttttcttacatactctatggaactttacaaaactgaatcaatgatttttattattatattttattacatatacttaggttgtactattatatgtaactctctctctgtatccgcttttttcggatgacgaaaataattaagttcgtactttaacactttatactcaaccatcccgattttaatccctttcgtttcttttaatatagctaataaatcacttacattttcatcatatgactcaaaaattttcgcgccgccctctccttgaaagattactttcatatattctccaccaccttaatttattgatgtggtaaatgacgcgtttaaaacgattcattctttatcctaaaattttcatatgaaaaagaacatcctttccaatcgaatgctcagctttttactaattatccatgttaaatatttattcaaaaacattatatgtattattttttaaattatgttcgatatccattattaaagagtaaatatatgtaataaacttgcataatgaaaaccgtagaatatccactttcgttgaaataattataatccataattttccattgtaattcttaatatttaaatgtaatattgtattgtcttactatctatttataactcacacactaattagaaaaagggaactctatatgagttcccttttctaattatgattacagtcattatttcttttctagaaatttaaatgtatctttaaattctttattattcactttaatatcagcatctttcaataaatcattgactacttgttgtttccatttacctgtcgtatcttgtagtctttgttgttctatatctttacgaattttatcctttacttcatcaaatggcttcaattcttttttatccgtcactttaataatatggtaaccgtaagttgttttaaccggctcacttacttggcctgcatctaatttatacgcagcttcctcaaattctttcactgtttgtccaggggcaaaaccagatatttccccgccctgttcctttgaaccagtatcttctgaatactgttttgctaaggcagcaaaatcttcaccattatttactttctcctttatttctttagccgttttttcatctttcactaaaatgtgacttactttcatttctggtttatagttatctttcacatctttatctgtaactgttgctttaattgctttctcaaatgcaatttctggcttcattttttcttttaattcatcttcatttttcaacccaagttgttctaaagtcgatttaaagttttcacccattttatcttttgcttcttctactttcttttttgcttcctcatctgaaactttatatttatctagcaatgccttacttaacatcatttgatataaagtactttctccatattgttgtcgtaattctttacttaattctttctctgtaacatttcctacttttgatgttactacgttgtctgaggaaccacatgcagataatgctagcatcatgcatgaaataattgttccaataaatattttcttctttttcaattcaaatacctcacttttatcattatgcaaattaactatacacagtcattgtgaaaacagtgtgttttctacatgtaattcatttcatatgagttgactatgtatcatgtattttcatttttaaatataaagagccttcttactatgcatagtaagaaggctctttatataattctcaaaaaaatatagcttctatagttgcttaataattacatgtttttcaggtatccaactattctgtccgatatctaccgcatttcccactctaccccacactcgaaaagatgtcgatccatctatgtttcctttataattcatacattcaggctcttcataataatttactccgtaaccgacaggatattttgaagttgcataaaaccatttcacattaaaatgttttaaatatacccactgcttatcgttccctaaacaaatcatatcttgctcaccgcctccccaataacctgctaagattaaatatggaattttttgagtgagtgtacctgtaaattgaggattcatgaggttttcatataaatttattccatatccatcaggatatttcgaaactgcaataccaatgccatttggttgctgtgtatacactatgttagattgatttgctttgttcgaatttataaaccaagaaagtgacttatttcctactaatcgattcagatcacatttcccaatcccaggaacattccctgaatccgtatattgccacatatcgcatggatatgctggcttattccctccataacgagggatccatacgaaatcagcttcaatattacgtgctccaaatgatagatacgtgtgatgccctacatataatcctactttttccgcacctaaacggcgtaattcatcaataaatgcctgtgtcccgccttgcatatctaccatcgtttgaacttctacgtccgctacccaaaacttagcagattgatcaccacgattccaaaaatcttgtgcctctttctttgcatcagcaatagatataaaacggcaaaaagcataattaccgaatgggatactatgctttttcatttcactaacataattttgatacataaaatccaccgtattagagccatcttgaactctagcaatcactaaatctagctgagatgctgcaatatcccaattgatagttccattccattttgaaatgtctacaatataccccatacattccagctccttttgaatgtcctattcatagctagttttattgtaagcctcagctctctaaaactagctatctataatataagtaaaaagaatctttactgtttttcaaaatatattctctttcagaaatatttctataaactttaacatgtatgccacataaaacattcgaaatataccctactattcatttattatgtaatctcgtcctattaatcatttttacagatattagaaaaaaatccctgttttattaaattataactttcagtatcgatttcctttcaactaaaaaatttcatccctcattttctatatattcttaagtcaaaattactacctctacatgaaatttgagatttagaaaaatttaaattaattgaagtttactccttttaaatcacaattttccaacctgaacactattggtgcataaaaaaagacattttctattaatgaaaatgtctttttacagtttaataaaacaactttggtgctaaatctgtattttgtaattctttattttcactgctcataacacaacttgtggaaaatagaattgggataccacaaatctcatctttcattacatcacgaaatacattggcagcaacacctgtaaacgtttgacataagttagaaatatcgtcattgaaaaactgaatgacttccgcagcgaaaaccggaaagacaacattcggtccgccagggaactgaggctgtaccacaacttgttcaaaataaggattattttctagtgctacttgaaataaatgagctatttcaaatgcatctagtggacaaggaaatggatttacaatttcattctcattattcgttacaataactgtcacacttacattcccaaattgtacaaaagattttaaaagagttactaatgctctcgctttttcgttgcttaacgcatgcactaaaataatataattaccaccaacaggaataagtggcccaactgtaacagttggatcagcacctattgaatttttcaattcattaaaatatgtgatccaaggtggcgaaagctgaacttgtacattcccttccaatattttacactacctccttatacaattcttactagcataatatgtaaaaaactaaaaaatgcatcagttatattaattaaacatcttatttcacattctcaattttccctttacatctttaagcacttttactactatgaaattctttattataagcaaatccactgaaatttcatattatactaatacgactctatatcctttaaattataatactcaatattaggagctgatttcatggaaaaaaaacctatcgtgttcaaaatcccaccaaattcaaaactaaaagttacatttttcggtccttgtaacgaagtaattacaaatgtgtctataattaatcaactatgcgcccctaaatgtcaaactatcacgcaatatccagactttaagaaatatgtaactgaagtacgatcgttatcccgttgttagtccgcataatgcacgattttcacaactttgttacctaaaataactgagaaagaaaataactgcattcctagactaaaattactcattttatgatattccattgataattcattgattttttacacgtttttattaaaagaacatatattatcgtatggagattatccactcataaaacctatctttctttggagcgtacttattatgtatgctctttttttatataaccgtcccccttctaaattgaccaacaatatattaaaattctttatatactcaaggaggtcaaatatgttcaagctgcatccgatactactcatcttaggattgattttgtttttatatagtgtaatcgcctttatgttattcttttcagtgtattagcattacctatacaaagctgtgttcaatatgtaatttctatatagtaaagaaaaaacgtaatgatacgatcttttatgtattccgtctttctgttcaataagaaaactagtaaacttactaacaatgagttttcacaagcatgttacttattattctgtttattatctgaagaagattgaaacctctacaaattaaactacactttacctatttacttatatattttagaaaaacaataatattcccccaccatttggtaaggggattaactaaacctactaaaaaacatttaatgatctgttttatttaattggagaaggaaatcttgctgcttcaaaatgtgccccatcttctaaaggacttaaaaccccatctatactactttgtgcataaatctcaacttcatcccctgcattcaattgaacaatcgtcgaaacacttacgacatttccaaaacttattggaccaaaaaagtcattatcgatagctatcgctgcgtttccattcacacgaatttctacacgcgctctataatttaaagttggatcgtttggaaagaaaccaatcgttccaataatagaatatactcctttagtcttcggcgtaaaaatagatgttgctggattatactcattcgctaaatcaaattgttcattttgaaataacactttcacaaaagtattagcaggaacattttgattcacagtatttctagctctaaatgccgatgctctaacaagattgtccttattatcatgacacttactagtgttcttacaacaatcatgatgcttctttttatactccttacaatacttacagtagtaataacaagacatactaattcccctttcaaacttattactacatattatgtaagattgatttataaggtttggactagctatttttcttattcataagggcgctattaatctgcacccttatttatataaaccacttcattccttactagttataagttgtatatagttccatatggaatagtaagaaaagaacttccgtacggtgtaacatgatgtactggataaaaatactctacggatgagtaatatggttgtactccttgctgctgcatttgttgttgcatttgtaatgcttgctgaatagcttggactgtactttgtgctccactatacgttatagacgtaccatacgctggtcgcatgccagcttcagaattaatatatgaataaaacataattttcaactcacttccgtataatttgttacacattatattatgattctttatttcattgggtactataatgctagtccgctcgcttatattcaaatgacaaaataaaacagtagctgctagactactttgaattcttcttattaccaaatgaaatgatatacatattctcctgttacacgctcatcgattccagcaaccctaacgaacctaagtaaatccgccccttgaagaaaatatatcgacatcgtaaccggtacttgtgaccacatgaattgaaaaagctcattcaccctctgattcgtcgtaatgattaaatcatttacaggtccatgattccatgcagaggtttgaactgaagtgaaagaaaggtctttcccattaatcactattcttgccacgctttgagttatgtccacaataatcccctccaacattacaaaaattggaccttttttagttcatattattataaatattcttgactgtaataaatgtttaaggcaaatccctaataaagtgaaactttaatcagtgggggtcttactgcccgttaatgcgggatacaatttttttattcatatccctcaattcccattacaaccatataatttctaacctgattcaatttttgtaaaagttgaaccagcaaatgtaaattccataaaagtattagaaaaattaaactttacttttgaaggtactctgagaaaaagcgaaaaatcagctggaaagcttatcgatttaaatatttattcgaaattaataagcgattaattttagtcactctgcccatacttaatcaaagtgtcggcttctttaatttctgtataaaattcaaaaatttgacacaatcctggaaaaagcttataaagaaaagtgaggttccgttattttcacacttagtagcgcagccatgttacatacaattttataagtgtgaacgaactacaaaactaaaaaacaaataataagtttgcaacatgtttgcaaatgcgaattttgcatataaattcgtgtgatattgaaaggagttttacttatgaaagaaattaaaacagaacaagaattcaaagacatcatcgcaagcgaggagccagtagttgttaagttctttactacatggtgcccagattgcgtacgtatggacaactttatcggagatgtaatggaagagttcaataaatttgaatggtattctattaataaagatgagtttccaagtatcgctgaagagtatcaagtaatgggtattccaagtttacttgtataccaaaacggtgagaagctaggccacttacatagtgctaacgcaaaaacagaagagcaagttactgagtttttagaagcatactaagatgaaagccctctggaaaatattttccagagggctttcatctgttttcataattatcttttgacgtttttcctcgtttaatgaattacaccttgtcatgataagaataatatgtagtaagaaaagtattcgtttcttgatccatctcccctcctatctctttagtaaatagactctaattaggtttacaccctgactttgtacttttcaacatatttttccttcacgaaactttgttatccccttcttaaaaagctataaaacgtcaacaatgtttgtatagacccacacgactttcgtttgatactctatttatagaaagaaattcctttaaagaaaggtgagtgattaaaatggatactctttctcataaagaagctgataaaggcgctattgtcagcattatggcctacatatttttatcctctatgaaaatcatcatcagttatattaccctctctagcgcattacgtgctgacggtttaaataacttaacggatatcggtgcttctttagcgatattaattggtctaaaaatatctcgtaaacctcgtgacccagatcatccgtatgggcattcgcgggccgaacaaatcgcatcacttgttgcgtccttcattatggcaacagtcggattagaagttgttattagtgccattcaatctttcttaaatccgaaacaagcagcgcctaatatactcgctgcatgggttgctttattttctgctgtcgttatgtactgcgtgtatttgtatacgaaaaaaattgcagcacgaacaaaaagtaaatcattagaagccgctgcaaaggataatttatcagatgcactcgtaagtattggtaccgtagtaggtattgtcggttctcagttccaaatgcctattttagaccctattgccgctttaattgtcggtcttattatttgtaaaactgcatgggagattttcgtagaatcttctcatatgcttacagatggaattgatcctgataaaatggaagaatacgctgatgctattgagcatattggcggtgtggaaaacattgtagatattagagcacgtatgtatgggaatcaaacgtacgttgatattacaattgaagtagatgctcgcatggatgttggagaaagtcactgtattaccgacaacatcgaagctatgcttcgcaaaaagtttggaatttaccatgcacacattcatgttgagccaatgaaaaaagaacctattatgacataggttctttttttatgaacgttttatggaatataacacataaaacgagccagctaccaccagctgcccatcctgctaatatgtcagatggatagtgcacgccaagatatattcggctaactgaaatagataatacaacaaagcttgctataagaataattaacaattttttatgcaacgaaatacgttcttcagtaattgtgacgtatgcaataaatcctaaaaaagcagtagcattcatcgtatgaccgctcggaaaactatatccagttgcagtaacaagctgcgtgacatcaggtcttgctcgttcgtaccatagtttaagcatactgtttaaataacgagatccgtagtaattaattgttagaagtaacgcactaagcaacttttttctaacgagaaaatacattacaagaataatgagtaatggaaaatatattcttttggaaccgataaaagacacccaagtaaaataggtcgtcaaataatcgtttcgaaagctttgaataaaatgtgcgactatattgtcaaagttctcaatacaagcggtatgatacgaaagtgataatacgacaaaacaaatgagtaacgtaaaacttagcaagtataaatgtcgatatcgtttcacatacataacctcactatgcaaaaaaaatggagcggttgttttagttttcctctccatttcttttttatgcatagtttattaaaaaatataattattaattttttgcttcatctcagggatatcttctcttgttacagtgaagcgaataaccttctcatcaagatcaagtgcctcagcgaataaaccagctaatccacgtgattttctatctacttccataattatttctaatcggtcgtatgcacgtggcaaaattaataattctaattcatctaatctgccgtagtactctccagaaaccggaataaactcaaattcttgtgcgaatggaacttgtttacgtaatcgatgcggtaattcttcacattctatatgacgtgctttaaaccctaattcatttacactatctaaaacactacttaataatgcattaggtaacacttgaacgtagtcgcggtcacttgggtctatactacgtttaatatcaagacctgtatgaatccaaaccgttttcataccaagtgtaagtggtgcttcaattggcattggaaaagaaaatggaatgtcaactgtttcatttggttctacagaaaaaggttcggttaagcgtactcgctctaaatcatatgttgctgttacttttttatcatccacttctcgtacatacgacgtcgataatgttaagtaaatgctttcaatttgttggctaactgaacctccagttatatgaacctttccaactatttcttccccaacaatatactcatctttttcaagaacagtatctacctttgcacttccaataccaacgcttgctaaaaacttttgaaacatggagtctccatcctttctaaagcagaagctacatcttgttttaaatcttgtacattctcatagtacggcgtttttatttgtaacattcgcataagcatttcacgattataattttccaaagttaattcttcgtaccatggtttttcctgtttttcattagattcatatcctgcatataataaaaataatgagaaatgaccgagcgcataaaagtcgctacgaaattgaacttctcgcatcaaagcttgttcaccttcgtaagttgtagctcgctcatcatcctcacctttccatttagctaatccaaaatcaataatactaatttgattttctttcattaatatgtttggaatgcgtaaatctcggtgaataatgccttcactatgaaacaccgatacaatttctaatatttcatataaaatttcaaaaacttcacgttctgtatatacatacccatctatgaaaatataatcttcaaaatttttaccagacatgtactccatcacaaagaagctctttttctcccatatgaaatgatcatatagactaggaattgcatgatgatttaatgtttgtaaaatcattttctcttgttcaaatgattttctaccagactcatatctttgtttactttgtcttaattgttttaagactttatatctatttatctgcaaatcattaacgacatatgtaaccccataactgcccattccaattactgattcaattttataatgctctgcaacaattgtattttttcgcagtggtctatcaaataatgctagtacacgacgccatttcatcagctacttgaaaagaagctacggcttttacgttttcttttataatgttgatgtccataaccagatgaacgtcgtttataatcgctacttgaatacgagcgccctctacgacgataatcactacttgaatacgaacgatattttttctttcctaataaagaatcaataatttttttgaacattccttcacctcttgagtaaaatttccttttcattatatcaataattattgactatacttgtgacaggtttgtaaagagtaaaaaacgacgagttatgcccgtcgttactttcattcatcctcttcatcaaaaacttcatcaatcatgcatttctctaataaatactcaaatgtaatatctgcgagatcttcaatttcttctcgttttgggacgtaccctctttcaattagttgctcataaaaaaactccgcaatctcttccgtatcaatcacgacttcaatttccttcatgagcatcactcctttatttctgttttatgaaaaaatctcaaaattatgtatatgagattagaaaaatagattttatttttttataggtcataagctttggacgagatgcatacgattgtagtacaagctattcaaagggggaaataataatggaaaatcaatatgaagtaagacaaacaaaagaagagttcatgcatgaagatcaatgggcagactctcttataaagtggctttttatttttttaatagttgtaggcataccttatactgcatatgttgttgttcaatttattctctctttctagttaactattttttctctgtcaatttaactaaataattatgaacaacatccattacaattttatattcttcatctttaaatgtatcgaacaataattgataatcgttataaatgtcaagtaatccatcaatgatttcttgacgattcgtcttaacactcacttttttcgagttgttaattgactttaactttcctaaatctaatttattcatacctgctttatcttgtttcattttcttcaaaattgcatttgccgtttgagcattggcgagtaacgttaaatctgattcatccgcttctaaccattcaccatccgtaatccgtgacaattcataaattgtatcttcccatgcgtcattcttatatctccatacttctgtacgaaaaccaacaatacggaaaacatctttatcatatccagttacttgcacaagatcaccaaacgtgaaattataatttaattcaatccactccgtatcgccctttttcatatcttgctctgtaacgtgctgcaatgtttgctctacgtaaaatccatcgtgattattgacttcgtatacataaactccatctaaaaccttcatatttgtgattttcccaacggttccatatagcgtaatcacgactatgtcccctacgttgtatttaggttgtttttttcttgccatctctatctctcctttttttgacgtcgtgattttgatatcagtatatgcaacctacataaaaacgcttatcacagaagcttatattcataaattttttcaataaaaaatataatcttataaaatttacattacacttaaacaaaagctagtaactagactagcttcaaatcaacaaatttcataataaaaaaacatacagaatacttcactttaaataaagtaatgtattctgtatgttttcaaatagtttttatctatcttgtatgtataaatcccaggcttcatcaaatatagacatactttctagcattccgctcaactctaagtatgaactaatttcatcatagtcttcagattgcttcggaaaacttaaatcatcatacatcgcctctgctaaatctgaaatttcatttctaaataaagctgcacgatgcttcatcatataatggtaaaatgtctttttcaaaaatattccctacctttctaacttgggtacattatacaaggcaaaaaagaaaaaaaccagcataaaagctggttaaaagtcgaaataatttctttttaatagacgcggtcttcccattaattcttcatatgttagttgttttggtaaatctttcgtgtaaattaagaataattgatcttcaatttcttttactgtatggtctgattgatagtccatcccacacgaggaacaagaaatacatggtgtctcttggatttcaatggctttcgtaccatctggtaattcccaatatacagtattcaagctttctttcgcttctgtactgtcacaccacatacaattcatactgcatcaccctcagtttttttgtcgttttcttctaacttagccatttgtgcttgatattttttatcttttaattgatcgcgcttatcacgtttatcttttaaagatgcatgagtatcattatcttcgtagtctttacgacggttcatacgctgtaagtcgtctggaacgaggttaaatttcttatcgctcataagacctgcgataccaacatctgaacgtttttcttcgtagttcggataaatctctttaaagtatccttccgctcttcctggaatatagctctctggctctggatacgtcgtaataacaccttcaaagttacgaagtacaactttatctgcactttgtgagattaaatagtttggttgaagtgcaattttaccgcctccgcctggcgcatcaacaacgaatgtcggaacagcataaccagatgtgtgtccacgtaaaccttcaataatttcaagacctttagatactggtgcacggaagtgaccgataccttcagataagtcacattgataaatgtagtatggacgtacacggatttttactaagtcatgcataagttttttcataattggaacgctgtcgttaataccagctaaaattactgcttggtttccgactggaacaccagcattcgctaacatttcacatgcctttttcgattcttcagtaatttcaatagatgtattgaaatgtgtatttaaccatactggatggtattttttaataatgttacataagttttctgtaatacgttgtgggaatactactggtgctctcgttccgatacgaataatctcaacatgcggaacctctcgtaaattttttaatacatattctaaaattttatcattaattagaagtccgtcaccaccggagattaatacatctcgtacttgtggcgtttcacgaatataagcaattgcatcatctaattgtttctttggtacacccattccaatttgtccactaaaacgacgacgtgtacagtaacgacaatacatagaacattgatttgttactaagaatagtacacggtccggataacgatgtgttagccctggaactggtgaatcttcgtcttcgtgaagtgggtcttctaaatcatattttgttttatataactcttccgaaatcggtactgattgcatccgaatcggacagcgtggatcatcaggattcattagccaagcatagtacggtgtaatgtttaacgggatcgttttcgttgaaattttaacgccttcttcttcttcaggtgttaagttaatcacttttcttaagtcatctaacgttttgatcgtattcgttaattgccaaacccaatcattccattgctcttcagtaacatctttccataattcgatatccttccagtgacgatttggtttgtatacatcatgtaacattgctattccccctttttatacgctcatcctttatataagcaatagttatgccaactttacattgttgataagtaaatgtgcggagaaccctattacataagcgaaaaaatatttttaagcgttgtatgaaatcaatacttaacatcatattcattactttttatatatgtaaacgctcttttattggtgcaaacacacaaaaaccgccgattattcggcggttttgtcgtacttgctcagtttatattgaagcgtttgacgagggatacccaacatttttgcggcttgtaatatattcccttccgtttcaatcaacgcttgatctattaattctttttctgtttgatgaagtgcttctctaagtggcattatacccttcttcttcgaaaacttctctttccgaaatgtacgtggtaaacaattggctgtcaatgtattcccttctgcaataataacagcatgttcaatcgtatgttttaactcccggacatttccaggccactgataagcttgcagtctatctttcgcttcctcatcaatttgaagtacaacttttttataacttttattatattctttcaaaaaataagatgctaataatagtacatcctcagttctttcacgaagcggtgggatatataatgaaaatacgtttaagcgataatataaatcagtgcgaattttattctctcgtaaacatatttctggaggctggttcattgcggtaataacacgaacatctacttttctcgtcttattatcaccaattcttctaatgactccatcttctaacactcgtaacatttttgcctgcaaatcaagaggcattgaattcagttcatctaaaaataatgtaccaccatcaacaagttcaaatagcccagctctttcaatcgctcccgtatagcttccttttgtcgttccaaacaataaactttctaatagcgactctggtaaagctgcacagttttgtgcaataaatggcttgttttttcttttagaagcttcatgaattgcttgtacgaacagttcttttcctgttcctgtttcaccatatattaaaacattcgcgtctgttggtgctactttttgtgctaactctttcgtctgtttaaaccgcgtatcatttgtcactatcgtctcaaatgcagcgtgctttttaatcactttttttctagatgatcgctttattttcgactgtaagtcaacaattgtgtcagtaagtttttgaattgtagagtaatcctttgcaatttcaacagccccagcaatattcccatctataaaaataggtaacgtcgtatttactgtacaaacatcttcaccatttaaattttgataatgttgtacctgatgtacgataggtttttttgtatctagtactttcatcaatgtactcgtttcccttgataaagacgggaacgcttctaacagatgtttccctaacactttttcaatcttggatccatcgtgttttgcagctacagaattataaaatattgtaattccattttcatctacagcgtgtatagcctcatcaatactgcccaaaatcgcttcaatgacttcttgtgtcgaaactgctagcaatgtcatcccccctcttgccgaaaatccagcaattatatgccgaattttcggcacacctatgtgcgattgtaagcatgacgattccgttctataattttgaccaattttatattttcattagataactcgaaactctaattagtacaactttttcgaacacccagctccacctaactgttttgctttacagccaaattttgagacggaagttttactgctttcgaataactagatagatctttcacccatatattcatatcttccaacttatcgaaaatgtagcaattattcgccagtcttcctgtatacgtatagcctaattgatgaaaggcagcattcattccgaaagaaagcgatcgagcaattgtataggagcagaaaatagatctttctcgaagctcttcctctaatttaattagtaaacttttcataaatccatgtttacgatattcaggtaaagtagcacaattcgttaattctgcatttccttcctttatgttcatttctgcagatgctgtactaataatttccccctcaaattcatacacgtagtaaattgtatcgtcttctttcatcgtctgtaatacataacttgcttcatttaaaggtgtcggatacacttcaaatacttttccgaagacagttgctaattcttctgcatcttcttcagtcgcttttctcagcaaaaatttctctggaactactttttcttttatttcttttccttttacaccgcttaatatagtatcttcctcagtccaatgcatactatttcgtctttcatcattattatatttcacaaaaaagtatgcatcgtgtccttgaaaataatgaggtatcgttgcttccaacacaaaaccgaaagagagccatgttgaaacatgctctccctttcctttaataatacatttagtgaaagaatgtttctctgctagttcgtcaattgtctgtataatactttcaacatttcctgtatagtgatctacccggatacgtttattaaaataatctaaaacgccttctactgtataacaattcgtctgttctctaaaagattcatagtatttcattttttcacctcacaccaatctagtaatgtacatgcaataatttttgcggcagctatcattttatcaacttctatatattcgtttggatagtgtgctactttcgtctctcctggaccaaatactattgttggtacgtttgcaatttgtgtaaataaacctccatcagtcccccacggagatgcttcaataattggttcgttcccttcgatttcaacaaagttatgatgaagtgttgtaatgagttcatgattttcttctaattcaccaggaacccatctcgctccaaaccattctacttctaccggattttcaacaaaccaattgtccacatcatttaattcaacaatccaattctcaaactcttcttttgccgcctctatagtctcattcggcgcaacaccgcatcttccttctaaaattaattcatcgggaacagaacttggccaactccctccttcaattttgccaatgttaattggaattggaattggaattcctttaaataacggatctgtaattcgactatttcttttctcctctagctttcttacatgttctataacaaacatgcttttttcaattgcactaaccccttcatagcgcgttccaccgtgtgcagctttcccttttacacgtagacgaaaccacatggaaccttgttgtttcgggaaaaacttcatattagtaggctctggaataatgacaccatctgctttatatcctcgtaatatagttgctaatgtccctgctccaccactttcctcttctattacactttgaaaatagatgtctccttttaattcaatactagattcaatgatcgcttccatcgcaagcataagtgcgacatttccgcccttcatatccgtcgttccacggccatatatacgatttcctattttctcaccgctataagggtgatgttcccactgattcacatccccttctggaactacatcaatatgcccatttaatatcatagatttcccgtcgccacttccttttaaagttgctacaatatttgggctatctgaaaaacttgtacggggtgatacaaaataaggatgatctttcattttagaaaaggagggctcccatatatcgagatctaaacctaattcacgtaatttttcaatcacaattgcctgcgcaccgctttcatcaccagatacgctcttttcttgaattaatcgttttaaaaatttcacactttcctcttcatggctctcaatataatcacaaacttgcttttttaattgctccatatattacatctcccttcattcaattactagtaagttagaactaatttgaaaatcagcttctgtatgtcgttttacatcttctactgtgtatgggctcattaattcttgtaatataagtccactcggagttacctccatgactgccatatcagtaataattaaatctacacatttctttgaagttaatggcaatgtacactctgaaacaatttttgcatttccgtacttatcaacatgattcatcacaacaacgacccgcttcgctttttgtgctaaatccattgctccaccaatacctggaacacgttttccaggtacaatccagtttgctaaatcgccattttcacttacttgtaatgaaccaagaatcgttatgtctagcaaaccttttcgaatcatcccaaacgctgtgcagctatcgaaataactcgctcctgttataagagaagttggtaaacctgctgcattacacaaattttcgtcttcattccctttacttggcgttggtcccatgcccacgattccattttccgcatgaaacataacatttatatcgtcaggcaaatgatttggtacaagcgatggtatgccaatacctaaatttacaatcataccattttgtatttctttcgccgcacgcctagcaatcttatccctcacttctacgcccatacccatttccagttcactccttccgacggtacaatataatttacgaaaacacctggaacgacaatttcctctggatctaaacttccaagcgggactatttcttccgcttctacaattgttatatccccagccatcgctacgtgaggattcatatttcgtgcacttttgtcaaatacaaggttaccaaacggatctgccttttttgcatatacaattgaaacttcagcagttaatgctgtttcaactaagtaggtcttaccattcatttcaactgttcgttttccctcttccacaatcgtatcaacaccaacatcaactaaaacaccaccaagaccaacgccaccagcgcgaatgcgctctgctaatgttccctgcggagaaaactcaatttgtaatcttccctcgtttagttgccttcctgcatttggattggagccaatgtgagaagtaattattgatttaactctttcatttgtaacaagacgaccgatacctacatcaggaaatccagtgtcatttccaattaaatttaaatttgtaacgcctttttctaaaattgcctgtattaaagatggaggggatccaatccctccaaatcccccaaacatcaatgtcatatcatcatggaacaaagaaattacttcctcaatttcttttaatttaccgaatgtatttgtaatagttgtcatgcgatactatgccctcctttttgcatcatctcttccacacttttagagaaaattgaaagtaattcatctaactcggaatatgtagttgtcattggcggtgctacaagcagtgcactatcttcttttcctgcttgccctgaaactgcttggtataaaagcagaccatttttagctgcaactgaaataagctctgacgcttttgtaaacggttgcaattctactccgattagcaacccttttccgcgcacatcagcaatgattgtcgattgttgctgaactttctgtaagccttttattaaatactctcccttttctgctgttttttcaggaagattatgtttctccatatattcaataacagctaaagccgttgctgcagacaatggatttgcacttaacgtatgaccgctcattactgaacgtgatccacgtaatattggttccataacacgatcacttacaactgtcgctgccatcggtgtatatcccgctcctaaccctttaccaagtgtcataatatccggctctacgccccaatgctccatcgcaaaccatgctccagtacgaccaagcccagtcattacttcatccgcaataaataaaatatcgtaatggtcgcaaatctctttaatgactttataatagtctttcggcggaacaaccgcgcctccagctgctccgataatcggctcagcaataaaagcagcaatatgctctgcaccaattctttcaattgatctttctagttcagtcgcacatgccagctgacaagttggatataccttttgaacaggacatctgaaacaatatggagctggtatagtcggataatcttccaaaatagatacgaaacgttgtctacgtagtggatgcccagacattgataaagcacccatcgtaataccgtgataactcatccatcttgataaaattttatgtttcccttgaatacctcgctcttgaaaatgctgaattgcaattttcatagctgtttcattcgcttccgtaccactatttacaaaaaaactccagttcaaatctcctacacttaaatcacttaacttcttcgctaatttttcagctggttcactcgtaaactgtgatctataaacgaaagcaatctcctcagcttgctttttaataacgtctgcaatctcctttacgccatgcccaatacctgccgtaattgctcctgacgaaccatcaaaatatttattgccattttgatcatacaaataaacaccttttccatgtgaaatcattggatacggctgaccaacaagtggtttaattaagtaatcgcgcatagcgctcccccatttctccaatttgtatatatatatgaagaaaattgacgtttctttcataaaaaagaatcctctgcaaaagcagtgaatttatcaaaaaactattataaaatatacaaatgagtgcttaaaaaattttataaaacagaaaattcagaactaaaaaaccgaagaccaacccttttctatacgcccaaatgaccctcctttttatatgaaatgactgcatcaccaaatgtttttatagcataatgccagctgtccttaaataccgacattctgtacacttcgacggaactcccgttaaactccttcctattatcctactttaaattgcatattttaaaacaaatttcgacacccaccttactaatcaattcagattcctattcattatgtaaacttttcatttttaaactataaaaaaagaaccgattaaccacactaatcagttcgtcatgacgctctcttatgggttaatactgtcaattgctaaaataaatagaaaaatgaagtttacaaattcatcctacagtctataacacaaaaccttttcataacttcattcacaattactatcgggatatccctatcccgaagtggcactcctttcctcagattcaaagtatctttcctttataatttatgtaggacaattatcactttgtatgtgtatttgcctataattaaaaaaatccctagttttctagcgatttttggacatgtattcaatatgttaattgaaatgcactttcaatttggcatttattttactttcgtacagtcatatgtactgctttactctgtgaaattctcgtaagcaccagcacctctttatgaaaacatatttgttgtcactttttaattttccctttataaaatcattttttttgcataaccgctttcttgcttcgcatatagttttaatgatgacaaaggaggaatgttcatgtctcaatctgaaatcgaaaaatatggacaagaagttacgcaatacgaacagctcgcacgttactatcagtttcgtaaccctaaaaaatatatagaattatatatgaaatattacgatgcactatcaaaacttgtacaggcgtatgaaacaagagactcacaagaagctgctttaccatcacatataagaatttttcatgccgatccaaatataccggcggttgacattttagtaaacggacaaaaggttattaaaaatatttcatttaagcaattcagcccttatttatcattagtgcaaggtaaataccgtatagatattgttcctgtcggaaatgaaactccaatcttttcagcgttggtaccaataatgggaaatcatacttatactcttgctgcaataaatagtgataatcacctacaattacaacctatacttgataatacacatttaccagctggtcaagcaaaaatacgctttgcacatttctctccagatacccctgttgtaaatgtagatttaaaagatggagatcatttatttgaaaatgcactctttaaacaaataaccgattttttgcaagttagccctggtacagcagatattgaaatttcactcgcagataataaaaacgttttattgactataccgaaattcaatgttgaaccaaatgttatttatacaatttcaatagtaggttattcaactaaagatcctaaattagaagccgttatactcacaaattaaaacagtctacaccattcatttggtgtagactgtttatttttgaaatgcaatttgaaattctgtccaatcgttatctgatcgacacataatggatccattatgtttttccacaatttgtttacatacaaacaatccaataccagttcctaactttttagtagttacaaatggttcaaaaatcgtttctacattttcagctggaatcattggtccattattttttatcacaattcgaatagcttgatcttcttcaaatacatcaatgataatttttcgttcttctttcattgattcaagagcatcaattgaattcattaatatgtttaaaaatacttgtctcacttcactccgataaccaacaagcggaattggatacggtaaattcttttcaatcaaaacattcgcattgaccaaactcggatataagaattgtataatgtcttgaaacaagtcattaagccaaaaccgttccgattcattccacatttctttttttgatacgagtaaaaattgcgaaatacgaaaatttaattgatctaattcatgcgaaataatatctaaatacgataaactcggatgatctgcctttaataatttgacaaaccccataatggaagtaagcggattacgaaattcatgtacaaaactagctgacatttgtcctaaaatcgtcagtctttctttatgtgtttcgttaatatattgctgtttttcctctaaattcttcgatataatttccgagtattttaaaacggtataataaattaatttgtcaaaacaagtatgtatttttgccataattggtttcaattcacgagcgctaacatctaattcacacatcgcttcgaaaagttcatttcttcccacgtttgcgttataaacaaaatctccaatattcgcatctgctccagcacgttcaatagcaattttctcacataacggttgaagataatttatatctttatcttccatagtaagttcgataattaactctagtaaatcctctccattttgaactacttctagtttaaatggatctttttcggaaattatcattttgtttttccagttctctacgaattggtgcctattgtttttcaagtgtgaacaaaatatttctttaatatccttatcgattggaaaaacctccattccctccatttccatacgacgaataccctttatattttgaatattaacacaaaaaatacgattcgttaatagatttttgtcacattttgttaatttctgttgataaaattattttttctttcttatttaactaattgtatgcaaatcccctttttccttcacatattttcattatttccgtagtcaaaacgactttttttgcatcatttttaattcttgcgtacaatagaaaatgaaaggtgtgaaaaatatggtaaataaaaatgtggaagattatctccaagaaggcatttacggccaaaagcaaaacaaaccagaagaacgtaatatgtatttaactacattacgtgagcgtgtggaaatcgctttaacgatcggtcaagtaatgcaaagtaatgtatactctgaagtggcgggtagcatgcgcccttctcaatcattacaactcctcctaaatggtggcattgcttacccacatttatcaaaatacattaaattagcaaacgaaaaaaatgttccttttacaattgttcaaaataaagatacaaaaacaccaatcggtttagtattaactcatgctactgctgtagataaagaacaaatttatgtagaagatactattttcaaacaagaaatgaagtaaaagttacacttaattaaatagttactagaagcgtaaaaaacgagtatggaatcgtaaacatttcctactcgttttttagtgcaagttttaagtttttctactttattttttaatacatactaatttcatttctgtcatttcttctattgcatatttaattccttcacgccccgtgccactttctttcacgccaccataaggcatatgatctactctgaacgttggaatatcattaatcatgacaccaccaacctctagctcatcaattgcacgcattgctttaaataaattatttgtaaatactcctgcctgtaagccgtaacgcgaattatttacttgctcaatcgcttcatcaaattctttaaatgtatttactgtcatgagtggaccgaatacttcttggcactgcacagatacatgatttggaacattttttaatacagtcggttcaaaaattcgtgcatcccgcttcttaccaccgcataaaacagttgctccttccttaattgcttcttgaacccacatatcaattcgctctacatctctttttgaaattaaagctgatacatccgtttcctcaagcagtggatcaccaacaacaactgattccatcgctttctttagcttcgaaagaaattcatgcattttcgtttcatgtacaaaaacacgttgtactgaaatacaaacttgtccattattaacaaatgctccccattttacacgttcaattatttcatctgttaactctacatcttcatcaatgataacagcagcatttgagcctagttctaacgtaactcgttttagcccagccttttgttttattccgattccaacttttggacttccggtaaaagtaatagaagcaacgtaatcatttttgacgattgcctcaccaaccgtggagccaggaccagaaatgatatttaaagctccatttggcaatcctgcctcttcaaataactcaactaatgcataagatgataatggcgtttgatcagctggctttaatacaactgtatttccggcagcgattgctggtccaactttatgcgctactaaatttaatgggaaattaaatggtgtaatagcccctataaccccaatcggctttcggattgtatatgcaatacgcccatctgcaccaggtgcggcgtctaatggcaatgtctcaccatatatacgcttcgcttcttcagctgcaaatttgtatgtttgaacagtacgatctacttctccccttgcagcacgtattggttttgcagcttcttttgcaataatctctgcaaattcttctcttctttcatccattttttgtgcaactttctctaaaatagtcgcacgatcatatgcagataatgtattcatttttgtcattgcattttttgcagcggtaacagcctcttttacatcttcttccgtgccttgtgcaatttccgctaatgtttcttcagaatatggtgcatataatggtttatacgtgtttacagatttccaatctccatttatatataaatgctttttcatacttcttctccttccaaatatatgtatacaacaatacttcacctagtgaaaggtttgacttatgtcattgtatcatagcccttatccctcaaaaaacattatgctcaaaaaaactctgctatatagcagagtttacgagctaatttgctcttgtaacgaaatttgtttttcatcttctaaaataacaatcgattctactatctttgtaacttctaatctttttatataatgtccatctaattctttcacacaaaacttataattttcaatttcaatggaatcctcttcagcaatctctatattcttcgttaaaatccaaccaccgattgtatcaacaccatcatcatcaatccctaaaccaaataacatattcacttcactaacaagtacttttccctctagtatcgtcttcgtttcactaaccttttgaatttctggctgctcatccgtatcaaactcatcctgaatatctccaacaatttcttccagaatatcttcaacagtaacaagtccagatgttccaccatattcatctatcaatatagcaatatgtgttctttctttttgcatttttaaaaacaaatcatgaattggaatagaatcgataactaaaataattggtctcatatattgctctactgtcttcttattaacagctttatgttgtacaaattcagtaaaaatatctttaaaattcacaaaacctattacgtggtctttgtcgccatcaacaactggataccttgtatatttttcacgagacattttttgcaaagcttcttcagcaggcatctctttacttataatattcatttcagttcgaggtaccattatttcttttgcaatgcgatcatcaaattcaaaaattttattcacatatttatattcagattgattaatctcaccatttttataactttctgaaactaacaaccgtaattcttcttctgaatgaacctcatcatgtcccttcggcggtttcagccctagcagcttcgtaatgattcgagctgaaccatttaatagccaaatgaatgggaatgcaatacgataaaagaaaattaacggcttagaaacaagtaaactcacttgttcagatttttgaattgcaaatgtttttggggccaattcacctattacaacatgtaaaaaagtaattaacaaaaacactaaaattacagcaaaaatgtctgctagttgagtagagatattccaatttgcaaaaagcgtatcaaacatttgctttaacgcaggtttaccaaaccacccaattcctaaagctgtaacagtaattcccagctgacaagcagataaatattcgtctaagtttgtaatgactgttttgaccgatgttgcacgattatttccttctgcaattaaatagtcaattcgtgaacttctcactttaacaattgcaaattctgctgcaacgaaaaatgccgttaaagcaattaaaacaatcactatacttatactatatatgtccaaatacttttccttacttactttgtaagcaaggaagccacctcctacttaattttattcaagtgaagtaagcattctaatactctaacaaaattctacattagcaaccacctttttatatattatatgcatacataaaaaagatatttatcattatgataatctaattcatttacaatcgtcaaattattctaaatgttacgataaaacatttttatttaaacgaactattcttctcaactcaatttcgtgaaaaaacactttctttgccgattccacacttcttttgtcgcactagaagggaacttacttcatagctcgaaatcattcaacaggatatatataggagggattattttggaatataaaacaccatttatcgcaaagaaattaggtgttagcccaaaggctgttgtccggatcgcacaacaattaaatcttacgatagagaaaaacaaatatggccactttattttcacacaagaggatgtcgatcaaatgttagaacaccatcgatttcaaatagagcaatctcaaaattctcaatctactcaaaaggcttcctcaaatgaagttgaggaattaaaaactcaagttaatacaattgttcaaaacatattacccaatgattttgagcaattagctgatcaattaaacactattacgagaagacttgatcgaatggaagaacaaatgcaagataaggcaaatgatgtcgtcacgtaccaacttttacaacaccgtcgtgaaatggaggaaatgttagagcgaattcaaaaattagaagctgccctaacgaaagaagaacccatttatattactcctgattcaaaaccaacatatgaacgagaaaagaaaccgaagcgccgcaaaatgatttttagtatatttggattataatttttagacccttattaaaataataagggtcttttttaatgaagagttatatcctatacaaatattattctctttattatacatattcacttcgctttatttcgttaacataatatttttactgtattctgcaattaatgcctgtgcatgagcattcccttgaatcacatcacgaaattcttttaaagaatacaaatgcgtaaccccttttcgagcatgaattcttactggtacaccttgtaaagtatcatgaaactgaaatggattatctattggctcaattggaaaaccaagtgtaagtaaatacatatacattctttttgttactgctgcaatgtaccattcagcttttgtttctaacgcatgtataaataaaatagctgttagccttttgaaatgtcctctcccacgagacgttttcgaaatacttaacttgcctatttcatatacattcttcaaatcttttactaaatcatttttagaaaacggatagaaaaactcagaatttgattgttcaggtatcgtatacttaatacattctactgtaccaataggatgttcatcttctattaataaaaatcgtgatggatttaaattacgttctacgaacattaagtttctttcttcacaaaaatctccccatagttgctcgaacccaaaatgttcttcctttgtttgaacacgctggaacatatttaaccgcctttcccatcgtcgctctgtttttgataacgctttcactatctatcatataagaacaaatcttcgtatgcaactaaaaatatttatgacttattatattctgcaaaatgaattagattccaatttaatcgacttttatcccgcgctcacattccttttaataacacatttgtagcacttttcaaatctaaattacattatgtttctttccatacagcatataattcttcttaatctaaagaaatcctttatgaaaaaggatttcttttacttcttaatgctttttaaccatttttcaaaaatttgtatcatcccatgttttccagctaatttctcttccccttgtttcgtcttatatggatataactgcaagaaaacaccgcatccagactcaatttttttactatgcatatggcttcctggatatacacaaatgacttcataaattgaccttcgataatagactcgctttccatcctgttcttctacatactttatagaccagtacttatacatttgctcagttgctttcgtatttccgacgtgctgaaaaatattgtacattggactatacttcacttcaataataatagaagatttatatacgtatttcccatcttcttttacataacagtctaagcgaatatctggcttcttcgtatcctcaccattgtaaaaattactacctttacttaatgcaataagaggatgtgtttcaattaagtcattaaatgcaacatgcacctttatatcatctcgttctaaaactactgtcgttccatcttgtaatccatctacataaaaatgttcttgtatttgttcacggatagagtttctagcttcaaaaccaatttgctctaaaattgaaataacgataaaaaaagcgtaatattcatacactaaaaacgttggcttataaacaaataataacgatggagattgatccgtatattgcgggagtacttctaaatgatgtagtaattgttgatgtggtatcggtaaatcatgtaagttcatgttacttgtttcagtaacttccctccaaaacgaagaatgcattaacatttgaaagtattgtacattttcatgcacaatatgcgccaatattttatattcttgtattttcattgagctctttcgtaaatcggcttcttttagtaaatgtatatttttatatttttgcttctctctatcagttaccgatccattacgctcaattgtttgtataatcgtttttacggcttgaaactcttctgattttttctttttttctctttctaagatttcaattgtttgacgtaaaaaactttttgcttcaattaaataatgataaaattgcatcgctttatatttaagaaatgcattttccttactatttttttgttccataaacttacgattataatatttggcataaggttttcgttctgctactatagttccttttcttgttggccttcgctcttttccttcccatttatattcatttataaattttgagcttgattctattttcttaaagatttgctttatcattttcattttttggggtaactttctaagtaacactaaataagaagaatcctcaatatcgctaagtgcagagaaggtctttttatagtaacctctatccaaaatcaactcatttaaaattgacttcacatagtcttgaatcatttcaaattgatcatcaaaaaagtttttcggtacgatttgaaatgcgccataatacgttgtatcttctatacgcacttcaaaatggtataaaccacagcgccatggataaaagaattctgttttcccatgttcatatattaatactctttgttttttttcatttatttcatattgagcctcttttatatttttctgtccctcatatactttattccatataaaagtaatattcattggaatttcataattgtactgcaatcttattggttttaattcttgtactttataaatacattgaactaatgctgtagtagatgtacaaagacgatttaataaaatataatctcctttcccctcatttccaatgattaactttaatacaaaagggagcgtttcattcgtatcaacgatttttgtttcgtaacgcccttcattttgcatatccatacagctccagttctctacgtttttctcgtatatatgctaaagagtgttcaaatgtagatactctgtttgcaagtgcagattgcaaaagaggtactaaggtcgcccccctttttgcttcttcagaaagtaaaggcccaaccatcatttcggtccctctgattttcgtcaatacacgctgctttatttgtaaatcaaacccctcttctctactgatcatataggtatggttattttggaacggtatgttttgcaaataagtcgcaattgcatttgcacatcggaaagaaattcccttagacgcgtcatgtgatgacaatacgacatgcaacttatctaatagctctaattcttcttcagaaaacacttcaatcatcgctttatttctcatccaatttatccgaaattctcccgctgttactttcaaaggtggatgtaatacgactttcccctgttccatgtccatctcacaaaacggaattttctgtaacgttattaggttcgttcgatctaataatcgatcagagagctcttttgttgtttcatcaaaattcacagtacctacaaatataatattttctccaatttcaattgttgatggaattgaattctctatgtcctgtacaccctcatacaagtttaaaatacgattttttgtttcaagttcaagaacagatagaaacggagtaaaccaatgctcaatatgagacatgttcatttcatcaaaaacgattatatacagttgatttggattttctttcgccttcattaacgtcctaactaacttcgtttcactttcaataaaagtaccatttggatgaaggtaaccaagtaaatcatgtggttcttgatacgatggcgaaatcggaatccaaaccaactcttccccatactgtaaccctaatgcttctgcataagtttgcacaaaacgtgatttcccaatgcccggtataccaccaagaatcgttaacatatttgtttttacacttatatgaaaattataaatatccgtttcatccaaatataaccctttattatgcaccatactttgtacatactgtaaaaaagacgattcacgctcatcccattcccattcatctttttgtacttttatatcctctacttcaactagcttaccttcttcatgcattcgtttttttaattgctcatacacataatcacttacaaaatataattgatcttctaccgctatttctacatacttcggccagtcactgcagtttatatatttacattcacgtttctgttcaaaataggcgattgagctaattgatgactttagggatatgtttccgtaaagtcttccatcgtgccacaataattcgggaggctcaaagtctttcggaaattttggcataagaaatgataaataaccgttgctaagttttcgttctaaagattctctttttttattatttgtaactttaggtgccggaatcattttatagctgcttgctatttctttcggttcttctgtacatattaactccacgtatacatttcctctttcataataaagacgaaacattactagttgcttttctaatttcctcttctttaattccgaaaagattttttcattctttttattgctacataacccttcaaatacatatggttcatttgtaaattgttcctgtaaagtgaatggtattggcgataagcattgtacaaagaaattctctccactcttctctttctcagcttttgtaaatttccctaaaaatctcatatagtacattcgttttataaaacttggctgaagagctttatgtaatttcaccttagtcaccttcttttttcatactattcttagtgtatgaaagaaacgaaaaactagaaataaaaaacctgacgttatccgccaggttcaaaataaaaacttatattaatgagaaggaaatgcttttttctcctgtaaaattgcattatgagcaattttcattttcgcaagtacgtaacgtaatcgatcttcagcgttttcatctttacttatttgtaattccgccaaattttcaacagaacttgctaaattttcaatgactcctcttagttcaggatgatgattaaaaaaagattcttgcactaatactttccttaactcactagctaaatcaattattctagacaactgttctttttcttccattctcatccctcctgaatatcttatgtagtaaatattctctaaacaaagaaaaaagccctttaaatgaaaaggactttttacatttttatatttccagttaataacatatatattgatgtgatagccgcaacaataattgcccacatcacatacttctctacacctacaaagcaacggttcccttgttcttttcttgcaaatgtgtaaacaataattccaattccatacacaattgaaacgagtagtaaattctttaaaccagctgcataaagaagccatacagagtaaatagaagcaattaaagctaacgctccgttttttaatttagcgtcttttagctcgtttgtaatgactaatttaaattggaataacgctgataataaatatggtaataaaattgatgttgaggcaatgaaatacataatttgatatgttgattccgaaaacaaaacgatgataaatatagtttgggcaacaccatttgaaatccataatgccatgtgcggtgtttgctttttatttgttttcgtaaagactttcggaaatacgccatcttttcctgccacatgagaaatttcagaaacaagtaaaaaccaaccaattaatgtaccgacaagtgaagcaactaatccgatgttaatcgcaactgcaccccatggaccaacaacgtgctctaatacatgccccattgaaggggtttctaacacagaaagttcgcctcttgtcatagctcccattgacaggacagaaattaaaatataaatggacattactaaaataagtcccaatactgttgcctttccaacatctcgactattcttcgctcttccagataatacaactgctccttcaactccaatgaaaacccaaagtgttacaagcattgtatttttcacttgaccaagtatagcggaaagtgagatcgttccttccccccaaaaatcatgtgtaaatgtgtcccagcgaaaggctgttaccattacaacaataaataaaacgattggaactaacttccctattgttgcgatcacattcataatagaagcttcacgaattccaaataaaattaaaaaatgaagtgtccataataaaagtgatgccccaacgatagacgcaacattatttcctcctttgaaaattggaaagaaataacctaatgtactaaacagtaacataattgttgcgacattacctaagattcctgctagccaatatccccaagcactattaaatccaatatattcaccgaaaccagcacgtgcataactataaattccaccttcaagttccggtttttgtcttgctaacgtttgatatacgagcgcaagtggaatcattcccatcgctgtaatacaccagccaattattattgcaccactgtttgctcctactgctaaatcatgcggtaaactaaaaacaccgccaccaaccattgttccaactactaatgcgattaatggaaaaaatcctaacttcttttctatttgtaccaccccatctgtcattctaggtgttatgttcgttcaactattaaagtcacctttttctctaatagacgtttctcttatattttttcaggaaaacattacttattctaaaagaaaatgagcaaaaatggaatacttttttgaaaaaatgtataagtatgcacaaaaaaaccgctcattttgtaatgaacggccatttcaaacatataaatttgtatatttcttgtaaatttaacgaagtaacttctctttttgtaaaaattgttttgcgacttcttcactacttttaccatttacgttaacttcataattcatttttcgcatttcttcatctgtaatctttccagataatttatttaataccttttcaagttcaggatatttctgtaacgtttcttttcttaataatggtgctccttgataaggtgggaataaccctttatcatcttttagcactttcagtccgtattgctccaattcactatctgttgaatatgcatcaattacgttaacatctccagattcaattgcgctataacgcagcttcggctccatcgttttaacattcgagaacttatagttatataatttttgcattcctttataaccatcttcacgatcagcaaattccaatgtaaatcctactttggcttcctgcgcaacattccctaaatcagaaattgtatttatattcttttgatctgctatttttttcggcatagctagtgcatatgtattgttatactccattggcttcaacataatcatattatatttcttttccattccaatgcgagcctgctcatatacttcatcacgatttgtactctttggttcttctttcacgaaagtagataaagctgttcctgaaaattctgggtatatatctacttctcctgatttcaacgcttcaaatacaaatgctgttttcccaagacctggttttaattgtacgtgtaaatctgtatcttgttcaataagctgcttatacatttgaattaaaatttcaggttctgatccaagtttgcccgcaataacaatatctttcttttctgtactccaaagaaatggagaagcaatcattatacaaacaatacatatcgtcaatataacacgcttagaagagcgtttcggtcgttcaagtatgcgaagtactatatcaaagaataaagcgagtaacgcggctggtacggcccctaaaatgataagcgcatgatcatttcgatctatacctaatagtataagcttaccgagcccacctgcaccaatgagagctgctaatgtagccgttccaacaattaataccatcgctgtacgaataccagccataatgataggcaatgcaagaggaagttctaccttccacaatcttctccaactattcatccccatagctttcgcggcttctattaaagattcatctaattcccttattcctgtatatgtatttcgtaaaataggtaatagtgcatacacaactaatgcgataatcgctggaagttttccgattcctactaatggaattaatagtccgagtaatgcaagtgatggcactgtctgcattactgcagaagttcctattataaattcagccattcgttcttttcttgttaataagatgccaagtggcaccgctataattactgcaaaaaataatgaaataagcgatatttgtaaatgctcacttaatgcagttagtaattctatttttcgttcttggaacgtttgtataaaattagtcactgtttagcctctttccttcatttgttcaacaatgtaattgacaatgtgacgacttgttaacgctccaatatattgaccgtttttttcaactggaacgacctcctcatcacgcacacgaactaacgcttcttgtaaagaagaatgtaatgatagcgcctgcccttctaattgcacactttgatcaagtggcaatacatctgctatacttttcccctcataccaagttcgcccacgatttccaatgaattcctctacaaattcatttttcggattatgtataattccttctggtgtatctagttgaacaacttttccttctttcataatacaaatgcgatctccaagtgataatgcttcttgcatatcatgtgttacgaatacgattgttttttgaatctttttttgcaactgtacaatatccttctgaagctgttccctacttaatggatctaacgcactaaatggttcatccataagaatgattttcgggtttgcagctaatgctcgcacgacaccgacacgttgtttttgtcctcctgacaattcatcaggcatacgatttcgataaatatccggatctaatccaaccatatgtaacaagtcatcgacgcgtgctttaatttcttttttgctccattgcctcatttcaggaacaactgcaatattttcagcaattgtcatatgaggaaacaaagcaatctgttgcaacacgtatcctatatcccaacgtaattcgtttatattatattgttgaatatcttttccatcgattaaaatcgatccttcagtcgtttcgattaaacgattaatcatcttcattgtcgttgttttcccgcaaccactcggaccgatgagaacaaaaaattctccctttttaatttctaaatgcaatgaatccactgctttcgtgccatcttcatacgattttgacacatgattaaattgaatcacaaatacaactcctttactgttgtttcctttattttgatggaatatggcattcatttcaaatgatacgcttttaaattaaaaaagagctcacatttgagctctaacggtcgaacaatattgttttcattatagcagcatattcgcgaacatacatttttctcttagaacgaattggtgtttcagcagctagtgcctccatcttcatgcctaaacgctttgcaattattttcgttcgatataaatgatacgtattacttacaactaccgcatgtttcacattatataaatccatactaaactttaagttttcatacgtatttgtagattgatcttctattaaaatacgactctcatctataccgtgtaccattaaatagtttctcatgctgtgagcttccggtatatcttcatcttctccttgaccacctgaaacaattactttcgcttcaggatgggaaaataaatactccaacgctacatccaaacgattttgaagagataaagacggtctatctccaaataactttgcacccagtataagaacgtacggagagtgatagctcaacttttcacgagcaactttgttcattctaaacgtcatataaatgatatatagtggcggtaataataaaatgataagaaagatccatttgttcataaataagtttgcactccctttctttttattatacagaaaaagaaagggcggcagaagtgttttttaaacgattgatttattagaaacattcgccgctactttacgttgtgatagtacataataaatagcgattcctaatgagaagatcaatatgcagcttaatacgtaaaatggaagcattactccggctttagatacacccgctgtaaacagcattaataatacaattcgtattccagtaccaattaggcgaaataagctgtctacacgtcccattacttcgtttggaatttcctccatcatcaatacatttctcgccactcttgtacccgcatttccaactgcttgaaaaattgcaagtccatataagaaaattacggaaggttcaataatcattgcggtaattgaaattacataaatggacatcgtcataacgattgaaacttctgtttttacatatttcattatgagtggaatacagattcctgcaacaaccgctccgacaccgtacatcatcccctctattgcgtatacagaggcattggctttaagtatatccgaaatataaactggtattaaataatttgccatcataacacctataaacggcatataagtggccagtaagaaccaaaagagcttaggacgttttttcataaagtgaattccttcaaacaattgcttcttaaatgttatttttcttttcacttcttttttctttacgtatggtatacataagaaaagaaaaaatgctccagcaaaagttaacatgtctactaacaaaatccacttcaaagatacaatttcaattaagaagctcgcggccgctccagaaataacttgtgttaactgtccttgtatttccatcgttccacttaaacttttataatgttctgcttgaaatatctcttggttgaacgcaaatattgtaggataaaataataaatagtagaatgatccggctatataaataagaatatagtgaatagaatgataaggttgcccagcaaatccccatataaccattattccgattacggctattccgattccttcgttacatagcaataaagattttcttgaaaaacgatcaatactttgcccaatgaatggtgttaataaaaacataatgagggttgcaatgatagaaacataaccaaatgttgtctctcctccactctctttaattaacagccaaggaatcgttatcataacaatcccggaaccaatagcagatagactattggctcctagaatgtaatacaagcgagaatcatgataaagtgaggacatatcattccactcctagttgttttttcacctctttatatacgctcatatatgctttcaattctttaactacatcatgaattaatggttttgcatcttccccaagttcaccatcttgcacatgtaatccatcaagcacaacttgttttggaattgcatttgcataaacacctctagcgaccgttcgcatgctgtttaatgcatttattccacctttaccgccaccagcaaccgctaacaacgcaactggtttatgaataaattcactactacttaagtaatctaaagagtttttcagcgcaccgctcatcgcattatgatattctggtgtacataatacaaccccatccgcagctttcactaacgtttttaatttttttactgcctctaaatcacgttgcgactcttctccattgtataaaggtaactcctcaattgctaaatcatataattccccttcaaattgatccgcaatatattttgccaccacgcgagttctaccaaattttcttggtgtaccgttaataacgactagtttcatgattatttctcccctttgttttcaagttctacttatatattatcagaaatttctatacaaaacacaatataaagagttaacttgtttcataaaatagtatgataaacaaaaaagaactcatactttcgtatgagtttcgtacaattactttgattcatctctcatgctcaatgtacctaaactttcatttgcttcaaaatgattatatgctttttccgctaatcttttccgttcttctggtaattctatatatttcattacgttttcaattattttttcgtacggagtaaatacaattcctggccactctacctcatcttctggattactattttcggaaataataaatttcttattcgcaactgcataagacacgcgaggtgtttcaagaattcctgataagtaaaaatgaatatttaatataattttagctctagcaatcaattcatttctaacaattccccacgcattatttttaaaaactatatttaaattcggggcaatcgcttttagatgatcaaaaatagcttgtcgcctcggattaagagcacctataaacagaatatcaatatcttcaataatctcatcttcaaacgcatctttttttatttccaaagttggagcatagttcatttctacatgttttatttcttttcctacccctttttgttgaagccattctatattttgtttactataatcccaaatcactctatcttttaataatattaaataaaggggatgcgcatatggacttccttcgtatagctgttctaaattataaataattgcatctttcggaagaagattcgggttatatgcgtatgtatgtgctccaaaaacaactgtattctttgcattttccagtattgtttctgatataattactgtatttccctcctgctccaaccgccactttaaagctcgcgcaacatctatgaaactaccgtatgtctttgggcatataaaaagacaataatcatattctttattcaaataaacttccattaatcttaaattatttttatataaatctacatctggatgtttaagtaccaactcatttgcatgttttcttgctactttatataatccagcataataagcagcgatgcatcttcttaattcgattctttcccggtcctcatctaatacatccatatttaaaagaagatttgcgatacaatacgcttttaaatgatcacgatcataataatagtctagtagtggcatcaattcttcatacgtatttccatgcaccgattctcctagttcaatcgcccatctcattaattccatgattactccactactcctttaaccgaaaatgtatttaataaaatttcgcattattctctactatatttgctatatgaaatggaatcttttcttttatcgattccaaatacttttgcgacaccgcccctaaatgttttttatgaggtatatagaaagcactaatagaaatttcatagtcaaataagtaatcatacacatgataatctacaaatagtagatcatcctttggaaaaggaatttccttcccttgcagagcatacatcaaagcaatattgttttgagatcgtaatcgatacaaccttgcaagttggtataatggttcagcccgggttggtctatattcccaagctttttgaaaataaaaaacagctaatgctaaatattgctcttcttgccctttaacagtttctttttcatcagcatctgtcacttcattttgtttatttgctgaacgatttgctaactgctcataacaaaatcctattcgcaataacgaatagaatacctcttcaacccatcctcctgcttccactcgttttttataccatttaattgaattctcaaattgacttaaatgaaaataagtctgagctaaataaaataaatatcttatatgcaaatctggcgttgtttctgggtcgtttattccttgtaacaacaacctctcatctctttcaaatttatcagctttgctcccgccatctccgggatcattcacgacaagagtctctaaccgagctaccctcgtattgtaattcgctccaacttttgaacgatctatatcccaatactcatgagtaacaccgacagatttccatggtaaagaagctttcaaaagacgtgtaagccaatatttaatatgaacatcatattgtaatgtaagataatgatcttccgttaagctcgttttatcgaaattcggatcaacctctaaaatcatatccgcatctaatattaataaataatctgcttctgggtatgttttttgcgctaacgaaacagctaagcttctgttataaccaaagtttttaaacggctcatgatgaaccgtcccaggtatctcattttccttacaccaattttcaataatttcaggcgtattatccgtcgatccagtatcacaaatagaaacaaagtctacaattgattttgttgcatttaaacatctttccataattctagactcatttttgacgatcatacaaagacataactttttttctttctttacagacttcacttgctcatttcccatttaaccacctcatattttattaacacgctcttctcatatgtaacaacatttcttagctatactgatgacataagcacccttttactatttatgaaaacttcattttatttattcttacttttatgttgagatatatttcatgcagcgctttatatttgatacaatcaatacaaaaaaacataatgcgggaatccgtacatttcaaagtctaagaggaggttatattttgttggattacatttggctagatgacaaatcaccaattttagaacaactaccaagcacctttaaatctgcagctatattgctacacccttttgtccaaatgcctttaggatgggaaaagtctgtgagaaaaagaccatatgagcacatctatcctagcgctgaagaaatcattcataatgggaaatccgtttcttggaaggaaatgatgtcttatagtggattacattcatacgcagaattagcaatggccctgttgacttccattggtgcttatacagaagaatataaaagagaggatttagccgaaaagctatattcaaacttaaaaaaagatctttattatccaacagaagattatacgtctatatttttattacataaattacttaaactcctcggttctaaaggtgcaaaaaatttatatttctctgaaccaattcttgatacaaacggattattagaggtaaataatactactccattagatatttgggacattagcaataatgagttaattattactggcgaagataatgagtatgcgtttatgagtatattcgattcctttacaaccttattattagctaaagaagaaaatatagaatatattgttcattcaatgaacgttgaagctgtcatttgtgacaaaaaaacgatgattgattggtatttttaaattagtaatttcttaaactataaaaaagaaacttgcgcttatgcacaagtttcttttcaaaaacatccttattttttcacaacttcatgtccaccgaactgattacgtagtgctgaaactacttttccatggaatgtatcatcttcctgagaacgatagcgcataaataatgacatagcgattactggtgctgcagcttgaagttcaagtgcagtttcaacagtccattttccttctcctgaagagttcattacacctttaatgccatctagtttcggatcttctgcaaatgctttttcagttaagtccattaaccaaccacggataactgatccattcgcccatacttttgcaacatcttcataattgaaatcaaagtcactcttatctagtacttcaaatccttcagcgattgcttgcatcatgccgtactcaataccgttatgaaccatttttaagaaatgaccactaccaacacggccagcataagaatagccattttctactgctaaatctttaaataaaggttctaattggtcgtaaatttctttttctccaccaaccattaagcaagcaccgtatctagctccttctacaccgcctgatgtaccgatatctacataatgtaatccgaagctttttgcttcttcagcacggcgtaacgtatctttatagaatgaatttccgccttcaataacgatatcaccttcatctaataacggataaacatcttttagtactgactctacaacttctcctgcaggcaccattacccaaattgtacgaggagcttctagttcagcgatcatttcttttaatgtatgacgtgcagtaattcctagttttcctgccttttcaacaagctctttatttacatcgtatacaactacttcatgcttgtcttcatataagtgttcagctaatgggaatcccatttttcctaatccaattaaacctagtttcatattaatcaatctcctattctatacaaatatatttaatatcgaaattagcccaagtgctactacagataatatagtctccattgcagtccatgttaataatgtttctttcacagtcattccgaaatactctttaatcatccaaaatcctgaatcattcacgtgtgataaaattaatgaccctgcaccagttgcaagtgctaataattcaacatttacacctggtgtgcttgctgcaatcggcgcaacaataccagctgctgtcatcatagaaacagttgccgatccagttgcaattcgaataagtgccgcaattccccaccctaataatatcggtgaaatatgtgattctttcgccatatctgcaattgtcgttccaattccagaatctaataatactttattaaatgcaccgcctgcaccaatcactaacaatatgtttgcaataggtccaaggcaatcatttgtaaattgtaacactttatcttttgagaaaccttttgcatatccaagactaaagaaagagtaaatggttgcaattaataaagccacaatcggatctccaataaagtgtaatacttgtgctagttgactcgttttatttaatgcaacttctgctattgatgcaccaagcataagaaatactggaagtaaaattgtaaacaatgtattcccaaagcttggaagctcttttttattatctttttcaataaattgctccgctatatctaatggtacttccttatgtatacgagcaccaatccatttcccgtaaagtggacctgaaataattgcagttggaagtccgacaattaatgcatataaaattgtcttccctacatctgctttaaaaataccaactgccgccattgccgctggatgcggcggcactagtccgtgcacaacggatagtcctgctactagcgggataccgattgtaataagtgatacccctgtttctaatgcaattgtaaatactaacggaattaatagtacaaatccaacttggaaaaataccggaatccctactaaaaatgcaacgaacatcatcgcccagtgaactcgtttcttcccaaaacgattaattaatgtgttagcgatacgttcagcaccaccagattcggccatcatttttccaagcatcgttcctagtgctaaaactattgctaaaaatcctaacgtattaccaagtcctagtttaatagaatcaataattcctggatcttttggtgaagttccaattaaaggcattcccattgctaatcctacaccaattgctgttaaaattaatgcgacaaatggatgccattttactaccgtaataagtaaaagtagtatgacaactgccgctagtacgatcccaactaccatttctcccaatccccctattttttacgttggaaagcagctatacaatcaaattcttctttcaagcgattgtaaagtcgttcatacatataaaacatttctaaatatatagccgtattttctttattcggtacatgatgatggacaatatcaatccaatcctttacctcttcaagagaatcaatttttcctacagcatacaaagcaactgccgctgccccaagcgcagatgcttcatgactttcaggtacaagcaattcttttcccatcatatcggacaacatttgtctccaaaatgcagattttgcaaaccctcctgaaactcgtatttcagtaagtggccctgtacaatccctgattgcgagtgctactgaatatacactcatacaaacaccttccatcactgcacgtataaaatgttctcgcttatgttgaagattgattccaaagaatgtaccacgagcatttgcattccagtaaggtgcgcgttctccagataagaaaggtaagaacaatagcccatccgctccagctggtacgctttctgcatatttaattaataaatcataaggatcaatgccgagctttcttgctacttcttgctctggactaccaaattcatcacgtaaccatctcagtaatattccgccgttattcgttggaccaccgattacccagtgctcatctgttaatgcgtaacaaaacgttctccctttctcatctgtatttatatttgatgagattgttcgaaccgcaccactcgttccaatcgtaattgcagccgcacccggtgatatcgcaccaactcctacatttgcaagaaccccatcacttgctccgatgacaattggtgtttctgcacttatccccatcttctgtgctaattctggcttcatacctgataaaatatatgtagttggtacaggggttgataatttttctggtgacatatgtaacatagttaaaacatctttatcccagtttaatgtttctaaattaaataaccccgtagcagaagcaatcgaataatcaactacgtagcgtgaaaataattggtaaatcacatactctttaatggaaatgaatttataggcacttgtatataactctggttcctcttctttcatccataacaatttagaaagtggtgacatcggatgaatcggtgtacctgtacgtctataaatttcatgcccattcatttgttgtaataatttttctgattgcttcgtacttcgattatctgcccaaatgatagaacgcgttaatggcgcaccattttcatctactgcaattaatgcgtgcatagctgtactaataccgattgaagaaatatcttctggtaatacattacctttttcaatggcaacgcttacacttttgtatacagcggcacatattacatcaggatcttgctcagcccatcctacattcggttgaataattgggtaatcgattgcatgtgatgcaatgacttttcctttttctgtgaacacaaccgtttttgtacttgtggtaccgatatcaatcccgattactctcccccttgtttccatgcgaatcttcccttcatttctagcaaaatacgatttagtaaaccgtttacatgaattagtatataaaatattttttcatttatcaagttgtaaaaagaaattttttttcatatcaaaaaataaatcccctcattccatttcacttatatactacatttagcttttccatggggtaaaattacgttatattcgttacgcaatacactctttcctctcattaacaacacatacatagtcctccatacgttctacttatttgcttgaagaaagagttgaaaagcaatattcatttttagcggtcacgtaacatcaccatccagccaagaaaagtaactaaccgcagaatgagaattctgtgcattttgctcttatttattgttttaggttcactagtcttttatcttgataaacatagagcgtggcccccctactatcacttttttaccttgtaaatatatcttgcatactataaaaccgaaaagtatttttatttttcagaaaaataaaaacaataacacgaaatttattgtataatgttgtaaaaagatgtcggagggatttaatgttaaataaaatatctcaattcacaattaagctttcgtcaattcttttatcactcttactattattaaatttaccttatttatttatcactcaacaaggatttacctttcaaccaatttatttttttaatcagaccgttactatgttaaaacaggtttttccccctgaatcattagtgattataggatcagacccgaagcttggccatttcaaaaaaacaccattatttccaactgttttagaaccttacctatattcatttactatattatttttagccttttttcttgctctctttttatcatctagcatggcatttttttattttttagcaaaagattatataaaaaaatggataaaccgaattgtgttcatattagaagctgtccctgatatgatgatgatgatttgtttgcaaatatttttcatatgggtacttcagaaatttggggaatctcctgtcactattatttcttttaatgaaaatcgagcttatttactccctattttatcattagctgtcttacctacattacaaatgtttcggatgatggtgttatacataaaagaagagcaaggaaaacattacgtagaggttgcatatggaaaaggcctttcatcaagttatatactatgcattcatttattcaaaaatatatctatccacttcttccaccatttaaaaacgatttttgttttcttactttctaatttattcattttagaatttgtttttaatatggaaggcattattcaatttttatttaataaggcgtttgtttcacctccagctgcatttatcacacttgttatgattgttttaccattttacgccattttccaaatagtctcattcatgatgaatagatggaaaaagcaattgaaaggagtatcattatgaaatctatttggaaatcaaaacgctttttaatcggctttacttatctattcatacttatttcagctagttttatttatagttggttctttaaagataacatcccaaaacctcctcagttactttacaatgacaataacgaattacttggaaaggccccctttccgccatcgttaattccaccttttggatctgatcgttttggagagtctgttttcttacaaattgtagaaggagcaaaattcactattttattggccatggcaattagcttctttcgaattttatgcggaacatgtataggaatcctcttaagtttatttgctccaaaactcaagagatttttccagtcatgctcagaagttttttattatattccaactctatttatcgcattcatactcatcacgcccgttaatattataatcacatcaaatgctgatggggtagatccaaatatttcatttacgttttatcaagtactcgtacttattttcgtcgctctgcctacactttctttatacatatcctcagaagttgatgaatttatgaaacaagattacatcttaagttcacaattactgggggctagtcgttttcatattataaaaaaacacttacgagtcttattacttgaccgcttatttgtattatttatggaacatatcgtccaaacactcatactcgttatccatttagcgttgcttaacattgtaattggcggcatacaaatgcgtgaactctatgacggagtgctcaaacctgtttctctatctaatgattgggcaggtcttattggattaaatcgtaatgaaatgaatctttcatggtggattattttttatactctcgcttcattctttattacgattctatttattaagcttatgaccatcgggattcaagatgcactgaaagcaagagattcgcaaattgtagcaattcaaaacgttccagatcataaaaaatttgttaaacataaagattccttttcgtttgcaaataaagtaaacctttaatcatttctcattaatcaagtattaattggcatcgatattagtagaaaataaagaagatgatccctattaaatacagggatcatcttcttatactgtctaacttttttacatgtcctttgctagactcatgctttttatatttaaagtgaattatttgcaatcacaattatgttttttaaaatcaattaccatacgcccttgaattctaccttgttccatttcttcgaatacattttgtactttatctagagaacaagtttgaacaaccggcactacttttccttctgccccgaacataaacgcctcttccaaatctttacgagtaccaactagagaaccaactacttcaattccatccagtacaagtcgtgggatgtttaagtccattgtttctactggtagccctactgcaactactttaccgcaagcacgtactgcatcaactgctgagttaaaggctactttagagactgctgttactaccgcagcataagcgccaccaaactcctcttgcacaattttatcagcaggaccttgagaaattggattgatagtcatatcagcaccaacttctttcgctaaggctaatttgtcgtcattaatatctactgcgattacctttgcaccaaatacatttttagcatattggatagctaagttacctaatccaccgcagccatagattacaataggttgactaggtttaatatctgatactttaatagctttatatgtagttacaccagcacaagtaattgatgatgcttgagcaggatctaatccttctggtacttttaccgcataatcagctgtaacgatacattgttcagccataccaccatccactgaataaccagcgtttttaacttcacggcaaaatgtttctctaccagttacgcaatattcacaacgtccacaagattggaacatccatgcaatacttacacggtcacctatctttagtgaagtaacatcatcagctattttcgtaacaatacctacaccctcatgaccaagaatacggccatcagtgttaccaaaatcatgattcgcaacgtgtaaatcagtgtggcaaactccacaatactctacatctactaacgcttcacctgagtgtaacggacgtaattctttgtcaatcacttcgatgtttgctttgctgtttttattaaccactactgctttcatatgtgatctcccctttagtgttttagcattttaatgagtttatctcacaactactttcttcactactttggctagttattctaccaaatttaagtgttcaatcatcattacatcttcatcataacatgacacttcataaacaacttgtgaaattatgaacaatatttgaattattacacaaatcggtctttattttaaatttttaaaaatgagagtttatcattgactataagtaagtcacatatttctaaaacaaaataaattaacaaacttctcaccgataaaaaagctcttcactcaatattttctacatgtaaacacttagtttcacagtaatatcctttgccaccaacataaactttttctattttatttttgctattggttgctaatttaactaatatttcagaaggcgagtgtaaagaataaccttgttcaaatacatagacttcttttttcaagtagtcctgttcataaaggtagcaagctaatgcaccgttcgaagttccagtcgctgcttcttcattgatgtcgtatagcggagcaaaatttctgcatataattcgattgtcattaaaagtatatagatgcatcccgacaacattataatacttgctgatttctttaattttttcaaaattaggttgcagtgcatgtaattgtgtttcgctttttataggaattaaaatatcttttaagcccgtggagacaatttgaattgggtatttattttctatatctttactatcaaaacagtcgatgaactcgtttggagatacaacatcatagaatatcggtttattttgttccatgaatatgatgtcatcttttatagtaatagtaagaacaccgctgttcgtttcaatcgtatagcgattcctgaaaagtttatttaaatgcatcagtatcgcgaaagagccaattgtggcatgaccacataaatcaacttcttcttttggtgtaaaatactcaaatttataatcagcaatttcagattctgatataaatgcggtttccgcatagcccagttgtttggctatttccattttttgagtagtggtcaatgtattctcaataaataccactcctgctttatttccgcctttatgatccttgctaaatgcacttgcaacataaacagatattttcataagacaccttcctcacttatagtaaattatagtatagaaagcactacatataaattccattggataaattatccctaaaataagaaacaaactatttttagcatttgaactctccaaaaatagtttgtctacagtctgaaagctcttcatttgaagagctttttttatattcgcttcatcgaaatcgtttcacgtatactttgtaaattttttagagtttcctcttgtcgctgcaacgacaaccctacatacaaagtatctaataagcttaactgtgctaatcgtgatgaacttgcttctgtgcggaattcagtctcacgtgttgatgtatataacgttatatcagcaagttgacttaatgctgatttcttatagctcgtaatcgcaataattttggctcctcttgctttcgctacttctaacgcttcaagtaatcctttattgctaccagaatgagaaataccaataacaactgaattttccgagagtaaacctgcccccataatttgaaaatgcgaatcagtatgagcgatacaagaaatacccgttctcataaacttatgatacgcatccattgcaataataccagagccaccatttccataaaactcaattcgacttgcttcttgtaaggctcgtacagcctgctcaagtgccgtttcattaagcaaatgtaaagtatcttgcagtcctgtaatatgcgaatgaaaaacttttttagcaacagttaccatactatcttctgctgatacctcttcatggatattttgcatcggtgtatgtacaatttcacgagctaatgtaatctttaaatcttgaaaaccttgcaaaccaaggtttttacataagcggaatatcgtagcttcggaactattcgtaacttcagctaattctgtaatagatttatgtacaacatcttgtggatgtttcaaaatatgttcggcaatacttcgcaatttcggtgataaaccatttaacgaagcctgaatctttccaatcccacttcttgtaccaggcatagcatatcctccccttccatcgtagctttatcctgtaaaaaccgattagttgaactaatcatcagtggggatggtcctccactgattagagtttcactttattgtacctaattatcgaaagaagaaaaacctatattagggattactataatttttaattgctcctatgtattctgtcatacgatataacagaattattcatgcttatgaataattctctccatgtttcactgcgtataatgcggcttgcgtacgatcatccacttccaatttagctaaaacgtttgaaacgtgtgttttcacagtttgttctgtaatatgaagttctgctgcaatctccttgttgcttcttcctttcgcaatttcgcgaagtacctcttgctctcttttcgttaacattgaaaaaggattttctacttccttctttactgcagaacgccccattaatgcaggtgttactttcgggtgaaaattcgcatttccttgatgtactgcaataatagaagcgacaagttgctcaggttgtacttcttttaattgataaccatctgctccagcttcaagtgctggtataacataatcttgctctgaaaaactacttaatataagtacctttattgtctcatcatattgctttagacgttttgttgcctcaattccatccattttcggcatcgatacatccattagtacgacatctggtctttctttttgcacgaaatgtaatgcctcttcgccattttccgcttccccaataatttcaaattcttctctcgttttcaaaaagaatacaagtcctcttcgaacgatatgatgatcctcaactagtagcagtttaatcttcaaccttattctccccttcaaatcggcaattgaatttctatttttgtaccctttttcagctctgttataatttgaaacgatcccttcattaactgaatacgttcctccatacttttcaggccaagtgctgattcccttacctgttcttgtataaatcctattccattgtcttctatgtaaaaatgtaactggttattttctattttcaaaagaatatgtaccttttcacacgaagcatgctttttacaattatgtagcgcctcttggctaatacgccataaaacttcttctatttcatcccccattgaaaccatcccatcaattcgaacttccacttgaactcctaataacttcccgtaattttgaattgcttctgctaatcctttctccaatccttcaggtcttaattgccaaattaatagcgtcatctcttgtaatgcttcttgtgataattccccaatataacttaacatctcttgcaattctctatcttgcgtcatattcagagtacctttcgctgttagcataatagaaaataacaattgttttactgaatcatgtaaatcacgtgcaagtcgatttctttccgctaccactacatatttacgttctttctcaactaattgaatacgttgtattgtcgttccaatttgaaatgcaattgattctaataatgctaactcttcctcagaaaaatgagtcttatgaggtgcagccacatttagtagaccaaatttttctgatccagacctaagcggaattgtcgcatgatgtgtaacatcttctgtctctccccaattacattcaattgcatcttctattcgcttacattcaataatattagtcgctttttccaatctcccatttacaaaacgttctacacaccaacagtttccttcacacatcggcttcttcttttgccacgtaagagcctctggtaaattttcgtctacaagcatactgtgctttccactttcatcaataaagaatatccaccctgtttgtaaattcattacttgtaacaatgtatgcaacactttttctaacatatcctgtaagtttgttgcttcatttaataattcagcaatttcttttaatgcttctaaacgacgcatctctttttcttcaaagttcattctcatcaccaactacaattataacattaagaaatttctaaattctataaataaaaaaagaaccgaattccttcagcctttctttatatcaatcattttattattgttattctatccaatgttggaagcagaatttttgttaacaaacgattctactttagctgtccgataaagattgtccaccatggatatgctgtaaaccttcagtagtaacaaccatattcgctgctggcatttgcacttgatttttatggaacatagacattaattcaaatcttacttgtctagaagtttcaaaataatcttctggctttattaaacctgtaatacaaaattcatagccaacatatttcaagttaggatttaagtctgtaacaccgacgtatttaaatggttcaacagcctcatcctctactctataaagagtttgattcaatttttcattgcatataacacatacttcttctaacaattccttcactcttgttggatcttcctgataacttaccgtgatgcgttcaattacacgcatccatcctttattaaaattttgtatcgttctaatctctccgtgcgggatggtaagtagttttcctgaccattcacgaatttgcataaaacgaatactaatctcttcaatagttcctgaatttgttccgttaaaagttacaaaatcaccaacccgaaactctttgtccgctaatcttgcaaagcctaatataacatcttttagcatctgttgtgcagcaaaaccgatgacaactccagctatccctgcacctgcaataatactttttatatctacaaattggctaattaaatatatgataagactgatgataatgatatatctaaaaatagatcgaattacactttgaatcgtttgctctatctcttcatcaaaaaagctcgatttcctaaaaaaccaatcaataatgcggtttattacaaatgaaataatgattagaacgaaagcaaatagtaaaaatcttaaaagtaaaaactctcttacataattaaaaaattcttccgtatacgttaataagctcatttaaccacttccttactaattaaaaaattcataatcgcctaagtttgttccagaaaaatctattatcctaatctaaaatgccgctacccttactatgtattttgactctattactaattcactttaaacagtatgtctagctgttctttttcctttccctttaaatataccctttttaataacctaagggggagcaaatcgtgaaatttttttatacgttaaaactttattcatctcattacgatttcaactcatttattcattaactacgtaaaaaaagagctgaatttatcagctcttttattcgatattaattgttgtcttactacttttttcttctttcaattttggcaattcaattgtcagtacgccatctttataatttgctctaacattttcttcctcaacttgtttaaaactaaagcgtcgagttacagaacctatagaacgttctttacgaatatatgtgccattctcatttttttcttctacttcattatgattagttgcttgaatcgttaatacatcttgttcaaaatcaacttgaatgttttctttttgaaaacctggtaaatctgctttcacagtatatttatcagattgctcatgaacatctactttaaaagtatccatgttcagtggcttcaagaaagcatctgtcatcccttctaataaagaaggcccaaaatcaaaaataccattttgacgttttgttatctctggaaataaattacgcatattttttcctccttattatttatgaatgaaagattatctctttctgcctttattataacatttggtcaaaaaaggtcaaagtttttgtttgaccttttttgatgtatattttaccaaataaaacacatgagatatttgacacctcttacatttataaagaggaatatatttatataataacgaatagtttatatgctcttatttttccttaatgaggttacctacaatggggtatatcgaagaaattagagaagttgtcggatcaagaccactcaatttattaggcgttgcggtagctgttttcaatgaacaaggacaaataaaagagaccttttttaaaggcctcttttttcacttcacttctgcatgtaggcatgacttaaaatgtccaagtgcatattcatgcccttgtgcattaaaagatgcaaccgccttttcataaacaacaattttaaaccctttattataagcatctactgctgtatgaagaacacaaatatcagtacaaacacctacaagatgaacttctgctattcctctttctcttaacttcatctctaagtctgttcctgcaaatgcactataccgtgttttatccatgtaatatacattctctgcatttttatatgtttcgtacacatcttgtaattcaccaaacaaatctcttccacttgtaccagctatattatgaggcgggaataactttgattctggatgatatacatcattttcttcatgtttatcaatagcaaagacaacgtaatctccattttcaatatattgcttcgttatatgtacaatttccttctcaatttcctgtcctggtttcccgcatgttaaagcgcctttctcagctacaaaatcatatgtataatcaatatttataagagctcgtttcattactatctctccttctcctgtttcacagtaaacaatagaaaatttgttattacgacatcgtatgtactattcgacatttcaaatgaaatacctacatttttcttgcaaaactcaccttaatccgagtttatcataaagtgaaactttaatcattggagagtttgttcatctccaatgattatcagccctcatcaatcgtgcatttacaggcagttgatctcccacctaatctcctcacctataccgagttttaaggtaaggtcttactgcccgttagtgcgggatataatagataaacaatggtaaaataaatagctcctattaataagtcatgaatttgataattgagcgtagcttgaatcatctcttgtatcgtaaaccaaaatactgccatcatcatactaatcaagacgatacgaatacaccgattcacatcttcaacctctttctctgtcatagtagtaacaagtgattacttcctatttaatcgtattagaaaatgaaataagttattcactcttgcacactctagtccaaacaaaaaagcacactactttttgagtaatgtactttttattcttgttaagacgcaggttttgtctcaaatgttgcttgattaaaactaataacctttcctttcgggtcattgttttcatactgaactgcagtaattgtatgactacctgtttccagcgttttttcttttaactgcactgttgtctgcgttgtactagttacttgatgtttatctgtatacatttgatctacaaatacgaatgtttctttatcactttgaaaattagaaagttctaattcaacttgctgaattaacgtatcctttttgatgaatacagtcggtatattgccgttttcagaagtaccatctggagtaataacttttactttcccttctccaattgacattgctccttcaggaaatacaaccatattctcatcacttgcgtttacaacttgttcttcctgttttgattgcgcgtcctctttttcctgtggagcaccgcaaccaactaataacaatacagacaatccagtgattatgaattttttcaaaattcatcccccctgtaacttcattataatttattatacaaaaataacttttaaattttgagactactttcaacactttcatgaacaaatagaatcttgctcacgattaatgtatcatactttccttaatagaacattaattttttttatgaaataaatagtaattccctcttatctatcattttagcccaacatatgaattacataccctcaaaaataaaaagacattgttagttcaatgtcttttctatgcagcaattaaaaaacaaacgttgtaatctcatctacttcttttcttggaagtttcttcggtttatctttcggaaatccgagtgaaataaccatatttatttgtttttcaggctcaatttgtaaatattggcgcagttcatcttgagctagcaatactggccctgtcattggacaagtaccaagtccctttgcatgtgcagctaacattaagttttgtgccgctaaacagctactcttaatgccttcttcttcccaaacggaatctggaacaaaagcaattggatcaaatatcttttcacggaactttgattcatatggtgttgccaaacatacaattaatactggtgcctccgagaaagctgttgcatatggtccgaaagaacgtgtaagtaatttccctgctttctcttctccattttctgctgcttttgccgcaagtttatgtaatgcatcccatgtcatttgttcaatttctttaatcttctctcgattcatgataactaagaattcccacgtttgtgaattcgtatcactcggtgcgtaacgagcacaatcaattatttcttttatatcattagtagatacttcttgatttgtaaactttctaacacttcgtcttccgtgaattacttctttaaaatcttcataattcatatattaaatcccctttttacagcgttttcaaaacttgtcctatgcttgaattatatcatgaaaaaaagccggaagaataccagcttttttcttcatgattaatttgtcactttaaacaaacgaatactctcttcgtatgcagcttgtagttttttcgtaattggtcctctttcaccagccccgaactgttcatcaccaatttgaacgactgggaatatttcaagtggcgtcgctgtaaaaaagcactcctcagcgtcatatacttcttgtaatgaaaactctcgttcctctacatcgatatgtaactctttcgctaatgtaattacgtagtgacgtgtaataccatgtaaaatgaaatgatccgctggatgtgtaatcaacttattattcttcacgataaagaaattggaatgacacccttcagtcacaataccatctcgtactaatattgcttcttgatacccttgttcatttattttgtttttgatcatgatattaggaagcaaatttaaagattttatatggcaaaacttccacctgatgtcctcttctactgtcaccttaatccctgcctccattgaagcaactggtcttgggaacgaaacaagatttgcaaaatatgtcggttgtaaatctgattcatatacatgattgcgcggttgtgtacctcttgatatttgtaaatatacattcccatcttcttgaaactgatttttttcaatcatttgatataactcttctactaattcttccttcgtaaatggtggaattagttttatttctgccatagagttaaagaatcgttctaaatgtaaatctaataaatgtggcttcccgtcatatagtctgaatacctcgtatataccatcaccaaattgaaagcctctctcctctaatggaatcatcggctgttcttccttcgtatttacaattcttccgttaaataaaatccaatctttatgagtagctttcattcttccccactcctttatcacatgattgttttaattgtacaacttatctacactcaaaagaaggaattttctgtattttaacaaacaaaaaagtgcatctcttatttaaagggatgcactcgactattcatttacttcagaaaatatttttcaatatcatctaacataagatttgcagctacaataccacctgctgtattccaaatcacttcatctacttggaatactttattatttttagaagcctgtagttgcttaaagagtggatcttctgtccattccttcgctaacgaatttccttcattattcttatctgcatctttatcagacgtgaaatagaataagtagtctccgtccatatttggaatctgctcttttgtaattccttttatcgcaaaatcatctttatcttgtaatggtggtcgtttaaatccaatatcatttaaaacaacacccgagaatgagtttttttgataaatacgaacatcacctggcacgaaacgaataatagaaactttagaattcaatttatcgcctaacttctctttcattccttcaatgcgttttttataatcatcaagagctttttgcccttctttttctttatttacagcttttgtataaagtgtaaagttttctttccaatcaccgcgtaatgtttctgcataaacagttggtgcgatttcttttagctgatcatatattttttcatgacgcattttatttccgataattaaatctggcttaagcttcattacagcctctaaattaatatcacgttcagttcctacaacttccgtgttttttaactctttcgctaaatgaggataccattcatcaccagcacgtggtttcgtagtccccactggcgttacgcccacagctaggagagcctctgcgccttcatttgttaaaacaacaacttttttaggtgtaccatttactgtcgtttcacccattgcatgctttaccgtatatgaatcttttgctttcgctgatatattattttcttttttctcttctttactacatcctgcaattacaaccatgagtatcataatgcagaacataattagttttttagtatgtatcatatgtcctccctagatgaaatcgattatcattaacatttaaagattaatgtatcttatatacattgtcaatgtatataagaaaacttttttaatacatactatttagattctatccgcttttctaaggtttctttttaaaacatagtgcataagtatgaaaataaatgttgttattaaaatgcgtatccttgttatacataacaaggatacgcatccatattgcattatcattttaattcctaatattgagtatatttaatatacgctgggtcattatatacccactgatttccaccaaggtttaaccaaccattttcatttatatatactaaataagattctggagaatttaattggcggataactgcagatgtagttgatggaccacttcttaaatttacattcatcccttgtatatatgcaaccccaatcgggcttccatcactattgcttgtctttacaaaattaatgtacgaaggatcattatacacccattgcccattccccaaatctagccatccgttactttcctgatatacaacgtaagattctggagaatttaattgacgaataactgaggaagaagttgatggaccatttcttaaatttacatttttcccaagaatataagcgattcccttcgtttgaggtgtcggttgtgggttagggggttgtggatttggagctactccaaaaatagctgctattccatttgcatacgattgacttagatcttcaataaattgtggattttttaataaatttgcatcaaacgctgtatcaataaaagcagtctcagttaaaattgcatccattgtggtttctcttaataccgcataattttctttttttgctcctcgatcacgaagaccatattttgttaatacaggattgacagctgtatgcattttttgttgctttgcatatgcagtgctgctattggataacgcattataaatataactttcaaaacctgtacccccgccgctattaatatgaaatgaaatgaaataaaataatccgcactgaaagcattagcaatattagcacgttcagataaagaaataaacacatcactatcacgtgtcattttaattgtaattgggtaatttaccgttaaaatgtctcgaacgcgtctagcaatttgaagtgttaagtttttttctactaaaccattaccaacagcaccagaatcatatccaccgtgccctgcgtctataacaagtttcattttattgccccgcccctttcttgtaatatgtttgcatttctactcgtcctattttatgtgaaatgtacaggttctgttacaattgcaaataaaaaaaccgccttatgtaaggcggtttctatcatcttgctttaaccaatttaaaataaatatatacgattgatagtgaacataacgtatgcaaaataaaataaataaaagtgctattccaacaccactataaagtaaaccaaactttaaaaaaacatttacaagtggtggaaagttcattaaattttgtaatgtactaagcatacaaaacataatgaaaaagacagagatgtattgtaattcatacggcttttttttcttactcattcttttccgaatgattatatgacataattctgctactataaagcaccctccaattaatacaagaccagaagtcatcgtcatacatccacctgccttatatttattgtatcgcataaataatcatcgttatattttctttacatactcttcatcttctgaagcaaaaccaaaactctctatgaaagacttcgccttttctgttaatttctcttgtagcactttgatttctttcacatttctttgtttcatcatttcttcaaatgtaaaatacgtatttgtaccataaccgtaaccttggtaatcaaaatgaataattagctgtgataaaacagcccgttcctcttgtacactataatctattacaccaatatatgtatcatcaactttcacacagtactgtacctttttctcacctaaactatgcgatttaaacatttctttaacaacgctttcattttctacagtaactttctcaaacgtaatcatatgttgtccatccttttactattattgtatcaataatacttcctatttatgaaaaaaaccttaagaccgtatgcgatcttaaggtttttctaattaaactaagctatacgcacgttttgtttcttcatggaacttattcgtatcgtatttatgctcaacataaatttggtgccataccataaacgcaagtacagtccaaattttacggctataatcgcctttatctgcacaatgtgcttccagtaagtttaatacatactgtttgtcgattaaatgctctgtcttactttcgtttataatatttatagcccaatcatgcatttcgtcttttaaccagtgacgaattggtactgggaatccaagttttttacgatctaatacgtgatctggaacgattccgcgtgctgcttcacgtaaaatagctttcgtagttccgttagcaatcttaaattcagttggaattttagatgcaacatcgaatacttctttatctaagaacggtacacgaagttctaatgagtttgccattgtcattttatcagcttttaataaaatgtcaccgcgtagccatgtgaacatgtcaatgtactgcattttacttacatcatcataatctttaatctcgttatacaatggtttcgtgatatccatatagttaacactttcattgtaatacttcattaattcagctttttcttcttcacggaagattttagcatttccatagtaacgctcttcaattggtgtacatccacgctctaggaagctcttacctttaaatccttctttaagagcaccacttaatgcttttagaacgctcttacctgggctaggaatgtaagagaacatttttagtgagtttggctcacggtaaatgttataaccaccaaatagctcgtctgcgccttcaccagaaagaacaactgttacatgtttacgtgcttctttcgcaacgaagtacaatggtacagctgctggatcagctaaaggatcatccatatgccaaatgatttttgggaactcatccataaattctttcgctgaaatgaatacgttatggtttttaacgcctaatttctcagcagtttctttcgcaacatcaacttcactgaaaccacgttgctcaaaaccaacagagaatgttaaaagatttggattcatttctcttgcgatagaagcgatgatagatgaatcgataccaccagataagaatgaacctactggtacatcactacgcatatgcacttttactgaatcatataacacatcacgaattgcttggatatgctcctctttcgttgcacttgaagcattgaaataaggtttccagtagcgatggatttccatctctttaccgatttcttttacgaaataatgaccaggctcgattttattaacatcaattgttaaagtttctggctctggaccatattggtacgtaaagtaatgttgtagtgacgttggattaacgcctttatcttccatcacatgcataatacttttcttctcagatgcgaagaatgtagtatcaccttgttgtgcgatgtataaaggtttaataccgaagtggtcacgtgcaccgaaaagtttcttttcttcacgatcccaaatcataaatgcaaacataccacgaaggtagtctacacatttttctttcatatgtgcatacaatgcaatgataacttctgtatcagattgcgttgcaaacgttgcacctttttcaagtaacatttcacgtaattctacatagttgtaaatttcaccattaaaaataattacatatcgatcattttcataagttagcggctgatgtcctgcctctaagtcaatgatgcttaaacggcggaagccaaattgtacatgttcatcacgaaaatatccttcgtcatctggaccacggtggaaaatcatcgtgttcatattttcaaattgatgtttttctgtttctgaaaactctctagggttttcacataaacatcctacaaaaccacacatacttcttaccctctttcagttttcattctgtctctatactactatatcaaccctatttatactagcataatcaactgaatatggcgaccaaaaactataaaaaaatcactccatttcacatttttaacaattttttatgaaaacatgaaaactaggcactcacctttctccgcttttgtcatatgatattgcaaattgatttctaggagggaataccatgagtgaagaaaaaaaagattcttctcgcccaccggttcgtaattacttaaagcaaattgatgatttcttcgagcaaacacctcttcgcaatgtaatcgctgatttaaatcattttttccaaaaaggaaaccgtttattaacattccctgtagatttatatgaagttggtgaagaactcgttgttacagctgaactaccaggtatacaaaaagaacaaatccaaattgaaatacaaagtgaatacttaaaagtctctgtaaaagaagagatacttgaagaggaagaagaacaaacatcccataactattatcgccgagaacgttccatttcagaagcatcaagattgattaaattgccgtattcaattaataaaaaagcggcaaaagcttcttatcaaaatggcgtattagaaattcgggcgccgaaacttccccagcaacatgacattttatcgatagactaatgcaaaaaaataagggtgctatgcacccttatttttaacccactaatcgcttcatatcacgtataatgtcttcgtatggcgtattactaatgccactatactttttcattacttttccgttttgatcaattaaataaaatgatgtaccatgcatgacctgaccgttctccggcttatctacaagtgattggaaattatcttttgaaaactttgtaatatcttctaacgaataccccgttaataaattccagttactagtatcctctgtaaacttttgaataaaagctttcagattttctggcttatcaaggtctggatctacactaaatgaaacaaactgaacgtctaatttctcttcttttgccatcttttgaagcttggccatatttgcagtcattggtggacaaactgtctgacaatttgtgaacataaaatctgcaacccaaactttcccttttaaatcttttgtaccaaattgctttccatcttgatttgtaaattggaaggtttctaaatcccaatttaatggtttacgaagctttgaacctgattcactacatccagcaagtacaaagagacaaaatacaaccataagaccaattattttttgataacgcttcatttataaacctcttttctctatcctaaatttaaataggttatgtttataataacaaaagttaacactacgagaaaattgtttactacatttgttcacgaaatcgtacgaatttacgtatgttacttctttatttcaagcgaattactagacaaaatatatttttttactattatttctctaaataaaagtgataaaactaattttattgttacttttgtaaatacctctccctattttttaacaattccttaaacattaatccatgttttacactgtattccttaacaacatttcggtacaatacaaatacaacgattttaaatgaggtgatgttcatggcaaagcgctatgaaaatatggataatgttagtacaaaaaaatcaattcgctcttttttacgctggcgtaaagaacgaaagcaaaacaaaaaagatttttctttcttagtagaacaatcacccgttaaacaaagtgcatttttacaaagtaatgttgaaaaaacgactatcacatggattgggcattccacttttcttatccaaacgaatggacttaatatattaacagatccagtatgggctaataaattaaagctagttccaagacttacagaacctggactctctatagaagcactacctaaaattgatattgtccttatttcacatggtcattatgatcatttagatttttcaactcttcgtcagttgaatgatgatgttctatatcttgtacctattggattaaaaaaattatttactcgtaagaaatttaaacatgtagaagagtataaatggtgggaaagtacgataattaacgaagtttcttttcacttcgtacctgctcagcactggacgagaagattcttatttgatatgaatacgtctcactggggtggatggattattgataatgaaacgactatggaaaccatatatttttgtggcgacagtggctatttccaaggtttcaaagaaattggtgaacgctttttaattgatattgctcttatgcccattggcgcttatgaaccagaatggtttatgaaagtatctcatgtttcacctgaagaggccgtgcaagcttatttagatttaaacgctacacattttataccaatgcattacggagcttttgcactcgccgatgaagcacctcgtgaagcaataactagacttcgaaataattggaatttgcgcatgttaccgtgggaacaactgcatgtactctttttaggtcaaacttttatttatagtaacgcaacaaatgataagcaaataaacgaaaaaattgaaactttacatgtgtaacgtaatgactgattttctatatccaacatataatatagaaaatcctatagtgaaactttaattagtgggatttcttcatccccactgattatttgccttcaccgatcaagcttttacgggcagcccgctacctaacctctttgctccagctaaatttgaggtagagagttttactgtccgcaaatagcaggataaagggtgttttctatgaatgaatatttacagactcgctatatcattagcggtagtgcctgtgtagctcttcttatttcttactttctatttacataaaaaagctacttgaaatatattttcaagtagcttttttattactctgctaaatacataaatccgattgcgcccggacctgtatgagtactaataataggcgttgtatagaaaatttctgattgagcaaatccactcactttttcaaccgccgctttcatactttcagctaaaggaattgctttcgcatgcggaattgcaacagcttttacgacttttccagccgtatcttgctcaaataacttagctaatgtttttacaatttggccttggctacgaactttcgttacaggattataaacaccgtcttcaagactagcaattggctttatattaagtagcgaaccgataaacgcttttcctttaccgatacgtccacccttcactaagttttctaatgtatccactactacatataaacgagtattctttcttacttcatctacacgttttaaaatttcttctagtgagcgtccgtcatttgccatttttgcagcttcaattacttgatatgctaaagcatgtgtaataaattgagaatcaacaactgttacttttgtatcagtcattgatgcagcgctatttgcagttgctacagtaccgctcattccacttgtcatatggatagaaaggacttcgcttccatcttcccctagcttgtcatacatttctacaaatgtacccatagctggttgtgatgtttttggtaattcctctgatttaatcatttcttcaataaattcgtcaggttgtaaatcaacgcgatctaaatatgtttgtccatttacagagattgataatggtaaaacatgaatgtcatacttttcgattacgtcttgtgataaatctgccgttgaatctgttacaattttaattttttgcatactatacttcttccctttccaatacgctctccttgttattatactagtattcccattgctttcaacaatttggaacgaaatttcatcaaattaattatattttcatatctaaaatgaaaaagacagagtttactaaccctgtccgtacttcgtatcatgcatttttttcaagggtatttgttttatatacatttaaataatcattccacttcaaacaattttgtaaatattcacggaaagaatacgaaaatcttgggtgtttttgtctttgaatttttgcaataaataattgaagacgagactgaattagaaacgataatggatgctgtgcctgtaggacagggatttcgaatattttaatgcaatcccctgttgaatgagtgaaataaaaacttttcgtaatcacaatatcaatcctctttttcattggatttttgaacttcctctactttgcgctgtaacacgttgtttaaagtggagtaaaatcagacttatatgatttctgtagtccttatggctagaagatttatactctattcatctccacctaattcaccttcccgtcctaaatatctctgagacgggaatctcattatccatcaattgtttaatacatttagtataagcttataaaagcgcaaagtttgtctaaattttggagattctataatttttttcttctatatattgtatacgtttatagctatagtataacaaataaataaaaaagtgcctttataacgaggcacttttcgactgcatttcttctcttttctttttcctcttactaacaacctttgataacgcaatacttacttcataaatacaaataagcggcactgcaactaaactatgagataaaaagtctggcggtgatatacaagatgcaatgataattaatgctacgtaagcataccttcttatttttattaaaaattccgccgtaagtattccaatgctagttaaaaacattacaacgactggcaattcaaaaatcacagcaaatggaactgttaaattaagtacaaaatgaaaatacttttctgtcgtaaacatcgtattaaacatttcattacctatcgtagttaaaaagtgaaatagaaacggcattacaatgaaatatccaaaacataaacctgcgagaaataatatagacaataccggtatatacattattgtcatcttttgttcatttggatgtaaacccggttttacaaataaccaaatttgtatagcagcaaaaggaattgtacaaacgatagcaaatactgtagcaatcgagaaaaaaatccacaatacatcacttggaccgagaacagttaatttcattggtaaatcttttacaagccaaaaataaatatcctttgtaaaagtaaatccaataattaaaaatagtacaaaggataacaccgtatatattactctttttcgaagctcaacaatatgttctactacgctcatttcccgatcttccatctcgttcaccacactttatttatccattacaaggaaaatacactacattttttctttcttttccttttcttgaaatgcgtcatctgtcaattctttcgttgattttttaaactcttttaacgtttcccctaaagccttcccgatttccggcaattttttaggtccaaataaaatgagtactgctactaaaattaaaattaaccctggaaagccaatatttgaaaacatttccccatcccctttattagtagtttccttgtcctactattacataattttattttgtcaaaaaagtttgaaaacgtcaacaaatccattgtcttttgtcaaaaaaattcaaaaatataatcaattatacaaatttcattttctattgctcttgtgtatgatatggtaagggaaatgacatattattttatgatagtagaaaggatttgcattatgactgaaaaaatgacacgaatgacccaatttgtaaaagaagaaattgcaaatgcaattacacatggtatcggtgccattttaagcatccctgccttaatcatattgattattcatgcttctaagcacggtaccgcatcagctgtagttgcatttactgtttatggtgtaagcatgttcttactgtacttgttttcaacattgctacatagcattcatcatcctaaagtagaaaaaatatttactattttagatcattcagccatttacttattgattgctggcacgtatactccttttctacttattacacttcgtggcccattaggatggacgttgcttgctataatatggacactagcaatcggaggtatcgtcttcaaaattttctttgtacgtcgctttataaaggcttcaactttatgttacatcattatgggttggctcataatcgttgccattaaaccactttatgaaaatctaactggacatggtttttcactacttttagcaggtggaattttatattctgtcggagctatattcttcctttgggaaaagctacctttcaaccatgccatatggcacctgttcgttttaggtggtagtgcgatgatgttcttctgtgtactcttttatgtcttacctacagcataataaaaaaggattcagcttactataagctgaatccttttttattacttatgtaattgtgatgcgataacttcctgtgtatgcttcgttaattctttaatatccatattcgcataatcttcaggtgtaatcggcttagaaattgttactgttgcatgagctggcttcatacgatttccattcgcttcaaacatcttatatgtaccatctaacgttacaggtaaaattgctacacctgactttactgccagatgaaaactaccagccttaaactctccaacttcgccacccttacttctcgttccttcagggaaaattacgatagaatgtccattttttaatagttcaattccatctttaatcgcttgaagagattgacgacgatcgctacgatccataaatacacaattcataagttccatccaagttggtacaactgggaactttttaatctctgcttttgaaacgaatccaattggtttatttaagtaacctagtaaaacagggatatccatattactttggtgattacttacaactagtactggcttgtctttcggaacattttcaagtcctttcacttctactgcccctccagctacacgtaccattttcttaccaaaccaatttgtcgttttatacacagcattatctttttcttttggcgccatcgtatttacttgtcttttaagacgccacattctcggtgtaatcgcaattacgattaaaattaaataaaagattttaaaaaacgtttgaatcatacagaacccccacctattatcattccgaccttcattatactagacaaacgaaggaaaaagaagaaaaaaagtccaaacagcaagtgtttggactttttaagcattctatattagaaacgttttgctaattcacgagcattagcaattgctgcttctttaatttcttgtgctttttcagggtttgcattcataccttcaactgcgatatattcagtatcatttacaccgacaaatcctaatacagtctttaagtgattgcgaccgaagtctacagctgcgtatgctccttcagaatatacgccacctgttgcctgaatgtgaagtgcttttttaccttctaataagccgactggaccattttcagtatatttgaatgttttacctgcgattgctacgttatctaagtatgcttttactactggtggatagctaaagttccacattggagttacgaatacataacgatctgcattcataaatgtttctaagtttgtgttcattgctgctactttttgttgttgaacttcagttaaagcttcaaagccttcacctgctgcaaatttaccccaagcagcaaatacatctgcatcaattgctggtactgtagtgttgaataaatcaattgttacaacttcgtcttgtggatgttcgtttttataagcttcgatgaaagcctcccctactgccattccgaaagaaccttctgctgaatttggatttgctgtgataaatagtacttttgtcattgtattctctcccttttttctctttatctttaattcaagatttgttttttaaaagttaataacttaccttatgtaagtataatacaaaaagttttaatcaatgtcaataaaaaatagctacttttttttcgtaagttaatgatttactttgtttccttaaaatttagtatacagatattaagaattctttcgtataaaaaggctacctctacaacttatagagatagccttctattacatattatttttgaaatacatgttttactttttcagctggaatattactcccgcctctaccttttacatcttcaatcatcattgtaatgaccatatctggtgaatttaaatcaaatgcagcgaaccaacctagttcttttccttcggcctcttttgatacttttaattccgctgtacctgtttttccagcaagagtcataccatcaattttagcaattttccctgtaccatctggatcattaattactttcgtcattgcagtttttaatatatcctgatttcctttagaaattacattttctttccaagcttttggttgtttatctgttttaataatatacggtgacggaatagttccatcatttacaatcggcgcatacgttaaagctaaatgaagaggagtcattaatacttgtccttgtccatatcccgtatctgccatttgaatatcatttttaatgccgtcatttgcaattttagaagcagggaatccatattcaattggtagtttctcatcgaatccgaattttttcgcttcactcataaacttgtcttttccgatttttaaagcttcttgtgcgaagtaaatattatccgagtatttcatcgccttatcaaaatcaatcggatttgcatctttcacacgcgttacatagtaattaccccaagaagaatcttttgtccattttaatccttcaattttcaactcttcttttggatcaatcgttttcgtttcaagaccaattgcagctgtaataggtttaaatacagaacctggtaccgacaattgtgtaaaacgatttgtcattggttttttcggatcattattccaagcttcgcgttgtgccttcgatgtccctcgtgcaattatattaggatcatatgctggactacttactagtgcaattgtttctccacttttcggattaattgctgcacttgaaccagcttcgcccttcatttcattatacgttttttcttgaacaacactatcaatagttaaagttacattttctccatcaacagcatctgtttttgctaaatttttaatttcttttccttgcgcatcttctacaaagacacggccacctttcttaccgcgtagcttttcctctaatacttgctctaagccagctttaccaactgggtcatcagcttgatagcctttcttttgtagcgtttttaaatcttcagcatttacctttccaatataaccagtcagatgagctgccgcttcccctagcggatatgtacgaacatttacaggttttgttgaaacacctggtaaatcaatgtacgtattttgtgttgccccttcaggcaaaattccaattggtacgagataccctggttttacccatttagcagctaatttttgatcaatttcttctacagacgtatttaataacttcgctactgtttctttcgtttgcggagcagtatcgcctaacttttcaggaatcaatccgatttcagaagctttcccattcgttgcaagaccttttccattacgatcgtatatttcaccacgttttggctgtgttgtctgcatacgcactttactatctttcgtcatgccagggaaaataaaatcaggagtccaatctattttccaagattctttatctccatctttttcttttaccatttttgcttcatgaccaaatgtgattttaccaccaactgtatccatgcttactttaaaaggaacaggaccttcatcttttttatcttcttttacttcccctgtttctacctttaagtctttcacttcgataccagaataaattttttcatatttctcagtaaactctttctttgaaatatctttttttgcattttttgatagttgatcatacatatctgcaaatttttgtttattccacgcttttacatatgtatcaaacgcttcttgtggtttttcttctttaccacatccaactaacatgaatgttaagcaaagaaaaagaatcccccatatctttctcaatcgattctcctcctctttctatattagtacttttgaaaattttagcatttttacatgctacctatcattatagcactatcgaatctcatctataaacttatattggtgaatataaataaaaagattgatgtgaattctcacatcaatcttttttattattgttgcttctcatatacatggtaataatacgtatacgggtttttttcatccgttaaacctttttctacaaaaatctctttccaatttgtcatatccatttctgggaagaatgtatctccttcaaatgcataatggatttttgttatatataacttgtctacataaggtaaaaagagatcgtaaatttgcgctccgccaaaaataaaaatctcttcttcatttttacatagttcaaatacttcttctacagaatgaacaacttcacacccttcaacatgatacccttcattacgagttacaataatattacgtcttccaggcagtggtctaccaatcgcttcatagttctttcttcccataataagcgggtggcccatcgttgttttcttcacgtattgtaattcactcggtaaacgccaaggtaaattattatctttaccaattactctattttcgtccatcgcgaccataaatgaaacaatcattttttcatctcctctacaattatactgcaaccggtgctttaattgctggatgcggatcgtatccttcaatcgttaaatcttccatttcaaaatcaaacacagatttcacatctggatttaatgtaagtttcgggaatggacgtggttcacgtgccaattgcttttctacttgttcaaaatgatttgtataaatgtgtgcatctccaattgtatgaacaaattctcctacttcaagaccacattcatgtgcaattaaatgtgttagtagtgaataacttgcgatgttaaatggaattccaaggaatatgtcaccacttctttgatatagctgacaagaaagttttccgtccgctacataaaattggaataatgtatgacaaggcggtaatgccatactcggtacgtcttcaggattccaagcagaaacgattaaacgacgtgagtctggtgtttttttaatcatttcaattacatcttttaattgatcaagtgtctcaccagctgtcgttttccaagcacgccattgtttaccgtaaacgtctcctaaataaccatatttatttgagaactcatcatcttctaaaacgttctttttaaacaattccatttgctcatcgtactgtactttaaattcttcatcttgttgtgagcgaagaccaaaatcagtcatgtcaggaccagtatactcatcactttctacccagctcttaaacgcccattcattccaaatgttattattatgctgcaataaatagcgaatatttgtatcacctttcataaaccaaagtagttcacttgctacaaggcgaaatggtactctttttgtcgttaataaaggaaatcctttgctcaaatcaaaacgcatttgatatccaaatacagatacagttcctgtccctgtacgatcttctttcttcgtaccatgttccattacatggcggcataaatttaagtattcattttcagcatgtttcatatgtaggaaaaccttctttcaatcgtatatggaatttatcataacatgaaaaatggtaaatttaataatcttaattaataaaatttcttgcgctaattcttacaaaattattaactttccatattttaaaaggttttcattttctattaccgaaagtatagtgcggtagatcaaaatttatatttggaggttagaaatatgtctaaaattgaaacacctgttatgacttctttacaaaccacggttgaaaaaatgatgaaggatttaaatgttcctggtgttgctgtcgctgttataaaagacggtgaagttattctttcagaaggtttcggctatcgtaatatggaaacaaaagaggctgttacaccgaatactcgattcgcaatcggttcctcaacgaaagcgtttggtacactttcattaagcttgttagcacagcaaaaaaagtttaattgggatgctcctgtcccgtcttatatacctaactttactttatctgaactacttgctagctcacaagttacaggacgggatttagcttctcatcgaactggagtgagtcgtcatgaggctctttggtacagttcttccttatctcgaaaagatctcgttgaaaaaataaaacatttaccacttgatgcaccgttccggactgcatttctatataacaacttaatgtatgcaacaattagctacattgttgaaaacattacaaatcaaacgtgggagcaatacactacagaacatattttagaacctttaaatatgagacatacaaacttctctgttaacgattcacaaactacagatgattacgctttaccttacattgaaaatgacggtgaaataaaagcagttccattccgtaacatcgatacagttggcgctgctgggtgtattaattccacaattgaagatatggcaaattgggtacttctccacttaaatgaaggaaaatttggagatcatgaattaatctcctctgaattattacaaccaatgtatacaccacacaattcaattccagaccaaccggttttatcactccctgaatctccattaaatagttacggtcttggttggtttattagcgcttatcgtggtaaaaaagtgattcatcatggcggtaatatcgatggattttcagcgcttgtttcattcataccaacagaaaacataggccttgttattttaacgaatgctggaggaacattacttcctacttatctcgctaatcaaatttatgacgaactacttgaattagaatccattgattggcataaacgtgctgtagaagatactaaaaaaatgaaggaaatgatgaaagaagcaactgaatccctccctgaacaaattaaagggactacaccttcgcacaagttagaggattatactggtacttttgaacatcctgcatacggaacattacaagtatacaaacgagatgattcgttatatgtacaatttatggaaatggatattcaattagggcatcatcattacgacatcttctccacaaaagttgacttattccaaatgaaaatgagcttattattcgcttatgaaatgaatgtaagtggtgaattcccatcccttcagttacatgtaccagctacattaagtactcagccgcttacatttaagaaaattaaataagtatcttgatgttaaaaaataaaggtaggtgcgaatcacacctaccttttctatttcatatcaatcttatctggttgaaaccaaattggcttcgataactcaaagttattatgatcctctaaaactatagtaagacgctctaacatatcatctaacatatgcggcgctgctcgtaatgtccagacaactgaggagaaaactgtcatgccaacgtacaccgtgtataatttccagaactcctctggtattttcctattaaagtatccttctatttgtccgattgaatacggaatactaatatcccttgcaaacagtgcaatttttacgaaatcatgaattgggtcgccccagtcatagccattaaaatcaacaacacctacatattttccatcccgtacaattatattttctaaatgaaaatcatcgtgttgaaatcgattcgggcggctctttaaatatatttcattttcttctataaactttatgattttatcatcattttttatttttattccgcatgttttgtatacctctacatatttactatgttttttcatagctctttcataccatggaagtatatccttaggagcttcaaatgtatgcatttttgctaaatcttttcctgcctctataccaatatcatattgttcttttggtgaatacgtaggcaatagcttcttcgcatcttccccttctaaatatgaaaaaatactatagcatacaccttcttcttccaatatacctatttcaattggcctttgtgcctgtacgttacgttttaccatttcatttaaaatttgaaactctattttctttctttcatactcttttatatcgcctgtccgaaataaatatttttcattatttgcattcgtaattacatatttcttatctggagagaaacctttagaaatttcttcaatattcgctgcatcttttactatttgtatattgctttgccgtgctgtaattatcttcatatctattccccttacatttctgcatttggtgtataggcaacttctacaataaatccattcggatcgtaaaaatcaatcgtatagtaaccttccgaataatgattcatttcaattggaccacgtattaccttcactttcgtactagaaagaaaatctgctacttcatcaactacttctctatgaatagcttgataacaaatatgtctaggccctaacgtccttacaatttcctcatctacttctttaaagtatatttcactttctcctgtgctatatgctatttcatttaactttctccacccaattatggaaaacaacttattataaaaagaaatggactcctctaaatttgctacccaaaattcaatatgatgaatgcctgctcgcagtgtattcatattaagaatacgctccttgtactacttgcacaatttccatcggcttatgaaccatgtaatctggtgcatcttttttcactgtttcaataacatcatatccccaagatacccaaattacgttcactccagcctttttacacgctgctacgtctcgctgttcatcaccgacatataacatatctttctctgttattttttttgatttcaaaaatctttttatcattttatctttaccgaacaaatttttagaacaatacacttcttgtatattttctatatcattcttttgtaaaaacgcccgaatatgctcttctgagttcgatgatatgactgcaattccgtagccttttttatgtagttcatctaatacttctttcatcccatggaacaaaacgagattttttatagccggctgatataatttataaaattccaacgctaatatcggtaatttatacagtggtacattaagttgtttacatctctctggcatcgttaatttacgtaaatgttcaatttcgtcttcctttactgctttatacccatgtttttcagcaagttgattataaatcggtacaaatatattttgtgagtctactaatgtgccatcaaagtcaaaaacaatatatttttgcattcccatactccctttgcttcttttttctaaacctatgttattcaacaacatagttgtctgtcccttctataaaaataaaaaagaacaagattttctcttgttctttttaagaaagccatttcggcggtacattcgtattccaataaatatttcctaactcatgatgtccagagtatccatcatcaaaacggtggtaatggaaattaaaataataaccatcttgcggtggatgatctcttcttacatggaaacgcaataaatcatttcctgatttcgtatcgtagacatgaaaaatcttttcattattcccaccagctggtttttgagaaatcgctaatgattgtagtgaatcttctggtacatcactagcaagctcagcaattgcctcttcaattttcggtaatattacatctttaaactcatcttcaattactggaccaattttagtaccaaacttttgcatcgactgcttctctgcttcttgcattgcataagtaataaaagtatcggtggttaacctgtcattcgcttcttcatatgtgtaggacgtgctctccaaactttgttgcccagctgtgctcgtaggcttgtccgcagctttggcattatcaagtaatatggaaggaggcgtcactaaaccaaatgtaaacacggtaattagtgcgactaaggtttttctaaaccaatttggcatttatgttccctcccctttcactcattattttttatataacggtggtttcttctattatacaaaatgattgtaattattgcactttacaattttgttaacgttcacatatttttcacttgaatatgaaattgtaagatttcatacaataaaaatacaacaaaaataaggaggcgatcagatgactttagatgtcatgtattccgccgcaagtatactcgttttagtatattttatttatcaatgtgttacagactagaaaaagagccatcaatggctcttttttaatggtagaaatacaatccatacaatcaataaaataaaaacaatgccaccaatcacagctggcaataaataaaaccgggaaagtataactattccatataaaagtattgctggtagtagtaaataacgatctgccttccatcttaacaatagtaatttcccttcatcacaatatacacgaagaaacatcttattcgtaaattcagtccaataatcacgtgcatagcgagaaattgcaactacagcaaatacgagaacaatagccgcaatccaccttggagtcataattatacttacagtactgatacatacaatttgaatataaaatattcgtgcagtacttgtacggaaaaattctttcaaaaaagattcgacaatacgagaatcagcttttttccctaaaagtcttttagagcgaggaaatatccacggttttttattcgaactactcggtttagccgcatgaccaccaacttgcataattccgctcgtccagcgcatgctttcctccttttctttctcgatttctttaaaaaagaactttttataattcattttctcttttactaatacactacttaagaaaattactagaccgataaataaaattgaatacaatggatttttataaataaaaaataaactaattccaaaaaaggacacgctcatagaaaatactacattttttacaatccataaaacccatcgtttccccacatgtacatgaataaatctcgttaacaacgacaacataaatcgaaatatagtaaagaatacccaaaataataggacttgtatccctgttacttcgatactttccatcaacaccggtaacataataacgactacaattatattcgttatcgctattcgaacaaatgtgtacatcatgccatactggactaattttcgcatatgtgttgcatacgaaattaaaaataaactatccgcttgctcaaaaaatgaacgaactcctcttccatatgtaatcacataaaatgcgagtaatcctaatccgaaataaatcgtctcttccgttgataattcatttatccatagcgatcgataatagattcccataaatataagtgctggaataataatatataatgcgactgtccaatctgttaccgaacgtatagacttccatttccgctcaagttcatggcgtaatctcttataaaattgttgtttaatcatgttgttcacgccttacaattacatcaaagcagtctaataatgaactacccggcatttccgctaatatttgaatagattctaaatgtccatctgcgactaatgtaccttgtgaaatgagtaaaaatctttcacaaattttttcagcagtatctaatacgtgcgtacaaaataaaattcctgccccgcgctctttttctttatataaataatttaaaaactctttcgtagctaccggatctaaaccgataaaaggttcgtcaatgatataaaaatctggctcagttaaaaacgccaatattagcatcgatttttgtttcatgccttttgaaaattttgataaatactcatgtttatgcttattcattcgaaaagtatgtaataattgttccgctcgttcttcccaacttcccatttcacttccacgagctgccattaataattcaatatgttcccagagcgtcaagtaatcatagtatgttggatgttctggtacgtatgcatacggatttttcttttcaccgaatgatatttcaccgtccatatttacaagtaatccgagtatcgttttaatcgtcgtactcttcccagcaccatttgctccaataagagcaactagttcacctttttcgatagaaaaagctatatcatgaattattttttcgcctatttcatatccagctgagcggatatttacttttaacatgcattccccttctttccatttctaatacaatcaaggaaaagaataacatataactatctatatatcattataaaatatttattttcatagcaggaaaaaacattttttaacagaatattaaatgtttgattacattttattggagtggataatatgtcttttcaaattcgtgaagcaacgatagatgatatagacgcactttgttctttaacgaaagaattaaaaggttcctctatttcctatgaagatatgaacaaccgattacaattcgtacaaatgagtccgtttgattttttatatgtttacgaggaagaagaagctatatttgggttacttggatttcgtatacgtgaaaatttagaagatgtaacacgttatggagagatttcaattattagcgttgattctaacatacgacggaaaggcattggacaagtgttgatggattatgccgagcaattagcaaagaaacataattgcattggcacatggctagttagtggaacaaaaagagtagaagctcatcctttttacaaaaaattaggatatgaagtaaatggctacagatttgtaaaacatttttaaactacttataaattgaagggactataactatgacaaacattaaagcaattttcattgatcgtgacggtacaattggtggtgacactacaatacattatccgggatcttttacattatttccgtttacaaaagcagctttgcaaaaactaaaagctcaaaatataaaaattttctctttcacaaatcaacctggtatcgcagatggaattgcaactgtagccgattttgtacaagaattagaaggcttcggttttgatgatatttatgtatgtcctcacaaacacggtgatggttgtgaatgtcgtaaaccaagtacaggtatgctgctacaagcagctgaaaaacacgggcttgatttaacaaaatgcgctgtaattggtgatcgctggaccgatatcgttgcaggagcaacagtgcatgcgataacgatattggtgcgcacaggcgctggatacgatgctttacatacgtaccgagacaaatgggcacatattgaaccaaactacattgcagataactttgaagatgcaacaaactgggttttaaatcaactataatacaaatgaaaattttgattcacccgaaataatttaaaacatagttaaaatagcctttttggcaaataattgtattccacaaaacggatcacctcaaaaggtagcaagttcccttttgatacgcaaacattgcaattcaaattatattttttattagtaacagcaattaacgtaaagaaggaatagcttagtggctatcccttctttattgacttctattatttacatttgttatctgtttttattgagtattctcatcgtttttatactccaaaatatcccctggctgacactccaaagctttacatatcgcttctaatgttgaaaaacgaaccgcttttgctttcccatttttcaaaatagaaagattcgccatcgtaattccaaccttctccgaaagctccgttacactcatttttcgttttgctaacatgacgtcaatattaataatgattgtcatatccgccacctcagaccgtcaaatcattttctgattttatgttaattgcctcttgtagaagtcgttggaggatagcagcaaaaacggcgataacgagcgaagcaaaaacgataatgagtcccactaacccaataggagggtccatttttttcgctataaaatgaaaaagtggcaaacttaatacatacaaaccactgattgtaattgcacagcgctttatattctttaacgcctttactgataattccgagaacgctgtgttctcatcaatgtactgtaaaagattgaaagcctgataaagagcaacgtaaaaaggcacagctgctacatacagtacaattaaaacaagatattttatcggagcaatgttaggatacaaattcgctgtgaaatccgccatttccggcactaaaaatatgcataaagcaagcactgaaattccagcaagaaaaataattacttttaagaacattgttgaacttcgtttaagattcatttacaatacctcacttatttaatggcaacataattttatcacaacatttattgtttaacaataaataaatatcgttttattttcgtcatgttttttaatttaggcaaaaataaaaaagaatttctcattacaaagaaattctttttcttgaaaatgtctctttcaacttaattttttaaaacgttaattcgtaatggaaataacgattatctctcaaataaccattttcagcgtataatcgttgtgctgataaattatcaatctccgtttgcagctttacaccttttgctccattttctaatgcgtattctttagcagcttctaataattttttacctgttccggctccacgcttcgccgcttgtacaaataaatcatttaaaatccataattctttcattgaaatagaagaaaatgatggatatagttgcgtgaacccaatatattcgccgtcttcaactgctacgaaaataacagactcttttttctcaattctatttcgtaaaaatacttttgccccttctaaatcagaatcttgcctataaaacatgcgatagttattaaaaactgatgctagtccatctaaatctgcaattgttgcctcatatattctcattttactccattccccttccaatactgtctcattatatccgttgcccatttaggctggtgtatttcttctgtcggcataaactctttcattattggttttatatccaatataggagtgccatcaatagcatctaatccctcaacaataattgatttaccttctcttttgatcatctttacaattgttacacctatgcgatttgggcgatttttcccgcgctgtgcaaaaatacctacttcaggataatccttattatttctaggatgtctagcaaaatactgaatttgctcgtcagttactttatgaaaataaaaaacaacttcaatatgagaaaaatcttcaaccccttgtatactctcttctgcatacatttcagttaaagttatacgagatcttacttctccccactcatcatcttttatttcctttctttcattatgtacaaatgcgattggttgaactgaaaacatacgcattcccccttaaatgtaaccacttacattataaaatattttctgaatgttttccagatatacgaataaagtttacataatataattatactctatctagagctaccttgactgcttcaattgcatgtatatgagttgtatcaaatatcgggacagatacgttttcttgctttattaataaccctatttctgtacaacctaatatgattccctgtgctcctttttgcactaactcttcgatgcctcttttataatattctctagattgagatactatttttcctaaacataattctgtatatattactttatttatttcttttctatttttttctgatggtactattacttttatattattttcttctatacgtgacttatagaaatcttgctccattgtatatttagttccaagcagaccaaccttttgaatgtcttttcttttaatttcttttgcagttgcatcagcaatatgtaagactggaatatcaattttggcctttatttttccaactaccttatgcattgtatttgtacaaatgattataaagtctgctcctcccttttgtaatgaatatgccgcattccctagaatttctccagcaccatcccaatctccgctagactgacatcgttcaatctcttcaaaatccacactattaatcaaacattttgctgaatgtagccctcctaatctctcttttatttcttcattaataattcgataatattcagaagttgattcccaactcataccacctataagacctatcgttttcatataaacacctacctaaacttttttataaaactaataacaacgttttattatgtatattatacacaataaaacaagactttaagtttgggatataaagtcttgttttaacgtaataatatagaataattgtactttcatttccaaggaaatttttatagaatattctgaaattaataatctgatatttttataaattctttatacttataattaaaacactctcgatacaactctttgatttcatcatatgatggaacacgtgggttattagctgggctaccactttcaattgcatctgatgccattttagagatagcattttcaaattcaatttcatcgataccgtattcttttaaatttggaatacgaagatcatagcaaagcttttttatttccccaatcgtgtagtctgctacttcctcatcagaattcgaatacaaatccttatttaagttacgtccaatttttgctaaccttttcactgcacttgtttttgtaaactctaacactgtaggtaatagtatggcatttgatattccatgcggtacatgaaataatgctcccactggccttgacattccatgaactaatgtaactgatgcattcgaaaatgcaattccagcttgtaaggaagcaatcatcatcgcttctcttgcctccatattatgtccatcttcatatgctatacgtaaatatttcataatactttcaatagctgaaagagcaagtacatctgtaagtggttgtgaaaatttagaaatataagcttcaatcgcatgacataacgcatctattcctgttgctgccgtaatttgtggtggtaacgaacttgtcaaaactggatctataattgctactttcggtataaaactaggatgcttcatcatcatttttacatctgtttttttattcgtaattactgctacacttgtaacttccgaaccagtaccagaagttgttggaattgcaataagtggtagtggattgttttctatttcaatatccttttggacataatcctcaacttctccaccatttgtatataaaaccgctaccgctttcgcagcatcaatacaacttccaccaccaataccgataataaaatcgcacttttcctctttacaaagagataacgcttctaatacgtgtatatttgtaggctcagcatccactttattatatgtactaacaataatacctttcttatttagttgttgcatacacttttcaacatatcctaatttctccataattgtatcagtaactataaaagctcttttccctaacttttttgattgttctcccagtttttcaagcgaattccttccatataataccgactttggcatacgaaactcagaaacctcttgcaagtcccccaccccttcttatcctaattaatattttataatataaattatcgatttgatgaatctttacgattcaaattttttaatagagtcctgttaaagtatagaatgcgataactaaaaatacagcaaccgttttcaaaatagtaatagcaaatatatctttatatgactgtttatgtgttaatcccgttactgtaagaatagtaataatagccccgttatgtggtagtgtatccattcctcctgatgccattgatacgatacggtgcataacttctaatggaatatcaaattgattggccgctgcaataaatttatctcccattgcgcttaatactattcccattcctcctgatgccgagcctgtaattccagctaaaatattcgtcgttactgcaccattcactaacggatttgtgaaagtagcagagatgccatctctcataattgcgaagcctggaagtgctgcaatgacaccaccgaatccaaactcagctcctgtattcatcgttgcaagtagcgctccaccaatacttgtattcaatccagcttggaaacctgttactactcgcttccaatataataataacgttgttaagatccctataataagtgccaattctacagaccaaattcctactactgcacttaattctacttttccaaatgctttcataccaattgcagaaaaatcaaaaccgcttggataccacttcggtatcataatagtaaacactttattcattacacctactaaaataagtggtataaatgcaataagttgttgcgctcttgtgatttcaatgttattaattaatggcatatttttttgttctacttgcaaagatgctgccatttcagtatttccatcattaaaaccaaaatatccttcacctgctgcttttgccttcttacgtctactctctaaatatagtaaacctaatgtaagaacaaaaattgctcctacaatcccaagtatcggtgcagcataaatatccgttttaaaaaatgttgtaggtattacattttgaatttgtggtgatccaggtagcgcatccattgtaaacgttactgctccaagaacaatcgttccagggattaaacgctttggaatattagcttgtcgaaacaacttagctgcgaacggataaacagcaaacactactacatacacactaacaccactatacgttaaaatagcccccattaatacaatcgctaatatagtacgtttttcaccaactaactcaataattgtttttgcgatagaatctgcaattcctgacatttccactacttttccaaatattgctcctaataaaaacacaggaaaatataattttataaatccaaccattttctccataaagatattagaaaagaaaggtaatacataactaggttctgtcaaaaatactgcaaataatgcaaatatcggcgcgaataaaataacagaaaaacctctgtatgctacgaacataagtaaacttagtgctaataatataataactaactctaattttacccctccattaaacagaatattctaaattttattgataaatttctactaaccttttaattctgacatccctcctcttattcatacaaatttttatgctaaaaatgtctaattataattattcgattacatatgaaaaatccctttaaacagaaacgaattcatcgtcatacgttataaagggattgctagaatctatatttactgctgtattaaatttttctctatacaaaaatgatacagttcttcaacatctttcactatgtaggtcgcactaacttcagtcagttctttttcacagccatagccatataaaacaccaattgaagcaattccattctgatttgcacctattatatcgtgctttctatcaccaatcattatcatttcttctttatttagttcttcatgtgtttgtaaaatatgagcaattatttcttctttttttattctcgtaccatctaaattacttccaatgatgtcttcgaaataattcgttaattgaaaatgctctataacttgtttcgcaaatacagtgggctttgaagttgctacgaatatgcgattccctgaactttttaattgttgcaagagcttcagaatcccctcttatacattattttcaaacaatccacgctgctttaaatactcacggaagtaaaaaacagcacgttcaacctctccttcactcatattatatctctctatgaatgattgctgaataggaggacctataaatgaatctaactcacttatatgtacttcttcaattcctactttttttaatgcatataaaaccgagtttacaatcccttctttcggatcagttaaagttccatctaaatcaaatagaaatattttatacatgcttcattcctccacttaatttgctgtataaataagtgctaacatctcttccacttctccctattatactattattatctattttttcgaaaaatcaatttccctatgtcacatactttcagttacaaaatacgatagatatgatacagtaaaaaagttacaattattttaatagaaactggtgaaacaaatgtcaattacgttaatttttataatggctttcacaattgtgatccacgcagttgaaacaagctcttatagtattcgattagctggagtacgtttaaagaagattgcggttgccttgtctgttgtaggaatggtgttacttatttcaagaacatcaaacttactacaagcctttttaatcggtggtattgtcgatgaagcaaaactagattcttctattaatttagagcatattatacgactcgtactattatcggcttctatcggtactttaatcgcgatcattctttatccaactttgacaaaattatttggatatgtcattcaaaactttgaaacagacggttctttcattcgaatgatgaaaacgaataacattcaaaaattaaagtacacaaaaaaatatgtccgttttccaaagttagaaatgattcatagactgcgtatcggtggtattccaaagcgtattatgcttattaacatgtttgctactgctatttatacagcaggggtactttcagccctttacgcttcttttttaaatccagattatgcaacaaatgcaagtacagcttctggccttgtaaatggtttcgccactattttattaactgtattactcgatccacgcattgctcttttaacagaacgtgctctacaatcagaaagcggtgctgaatctatgagtaaaatgtatggttggctaatgatttctagacttctcggcacattattagcacaactgctatttgtaccaggtgcttactggattttatggattattgaactgatgcattaatttactagaaaggtgaatttatcaatgaagatcaaaacagagaaagatataattcgcttaatagaaaacgacgaatggatgatgaatgtattacaaatggcaaaattactagagctacctgattggtggatttgtgccggatttgttcgttctaaaatttgggatactttacatgactatgaagctaaaacggctatgcctgatgttgatgtgatttattatgatagtctacatcaagatgagatatacgaacaatcattagaaacgaaattaatgaatattgatgctactatcccttggtctgtaaaaaatcaagctcgtatgcatgtagtgaataatatgccaccatattcttcttctgttaatgctatttctaaattccctgaaacagcaacggctttaggagttacacttgatgaactaaacaacgttatcttaacagccccatgtggtattgaagatgtcctttccttacaagtgaaaccaacagctcattttcttgaatcgaaagaacgattacatatgtacaaaaacagagttataaaaaagaattggcaaagtaagtggcctaacatcacaatcacatatccagaaatttagaaagggtgcctctcatttatagaagcacccttttcttcatttcaaaaaatgtatgactgtttctgcaaatctatctgcttcctcataatgaggtgaatgaccgctctcttcaaatacgatatacttgccgtttcgggcatctttattaaatgttttaatttgttcttcacacgttactacatcatgttttcctactattaataacattagattttgtacatcttttatttttgataataatgatgtatgacatgctccctctaattttaatctatcaaagtgaattttggagcgatttgaaaatatttcccactcttcatcactgtataaactctcatctgtcctattttccttattattgtaaatctccattcttttttcttctaattcagcgcttagtcttatataagcttctaacaactcttctgaactagcatcgctagatgaataagcaaagcattcttttgctatttcttcttttccatacttttttaataaatgtcctgtcttttgtaacaaagccctacttgttaatgcaaaattaaaagttggtccttcaaatattattttctctattgaacttggatatatcgacgcataaagcaatgctacatatccaccgaaagagtgtccaattatagaccacttctcaatttgtaatactttttttaattcctcacagtcttcaatcaaatcatttaatccaaaagcttcgtcttcagttatttcttctgagcgacaaacacctctttgatctattataattacatatagagaatcttttaaacgttccgcttgatgaaatgaaaaatcataacaactttctcctggtccaccatgcaagtataagactggcttatttttaggatttccatgtgtttcaacgtatagctttttccctctaatattcatgtatttccctgcttctatcaaattttcctttataatcaccacccccctttttttactgaatattataacatttaatattaaataattcctattacatttaagaagacgataattattgcaagtggtgctacaaatcgaagtaaaaatgcccaacaagtaaatactttctttccataatttccacctacaaaaaactctgcttctagtaccttcttctccattttgaatgaaacgaaaatactaataaatagtgctccaagtggcattaatatattactagataaaaagtctactgcatcaaaaatattctttccgaaaatcgtaatatcactccatactccaaatgataacgctgatggtatacctaccaagaaaatgccgaaaccgatcatccatgataatttcgttctcttttcttgttcaccatttgctaatgctgaaacaacagtttctagtagagaaaatgctgatgttaatgtcgcaaatgtaaatagtgcaagaaatactgttaagaaaaatccaccgaatgggatttgactaaatacagatggtaatacgataaatagtaatccaggtccttctgttggctccattcctaatgaaaatacggctggaaaaatagcaagacctgcaaataatgaaacaaataaatttaatccaacaattgttattgctgattttggtaaactttcttttttatttaaataggaactatacgtaaccataattgaaatcccgatactaattgcaaagaatgattgccccattgcgaacaaaatactttccgaagtaatctttgagaaatctggttgtaagaaaaacttcacacctttcattgcatcatcaagtgttaacgaacgaataataagagcgacaaataaaacgaacaatgctggcaacatatatttacttgctttttcaattccgttttgtacaccctttgatacaacccatatcgtaatgaacataaaagcgaaatgtcccataatagcccaagcaggattcccaattgtttcagtaaataatgtaccgtaattttgtcctggagtaatcagttgtccagttattcctctgaataaataaattaatacccatccacctacaacactataaaacgaaagtagtataaaacaagttccaacaccaaggcgtccaatccaatgccatcccgtatttggtgcgatgcttttaaatgctccaactgcttgtttctgcgtactgcgtccaatcataaattcagctataagtagcggtagtccaattaaaacagtaaataatataaatattaaaaagaacgctcctcccccactcttcccagcgatataagggaacttccatatcgcaccaagtccaattgctgatccggctgccgccattataaaacctaatttcgaagtccattgctccgtctgtttcatctcattttcctcctaattaaatctttttatataaataaataaattttataaacctattcaaataaaccctccatttcttcttccatataataaaaaaatggcctagcatctctatataaagagacgctaagccatttacttaacgcggtaccacccttattgattccattatgaatccaccttagtagtaatcgtttgattacaaacctaatatcgaaggttaaccgttaagatttactaagaatgtaattccgttccaccttactgctcctaggcgagttcaggatgttatttgactatgtcacaccaacccatagctctctgtacaaatacatgaccttactactcctattcaacacattttaatatttagaatatattttcttttgaaattaatatgaagtatatctgttatatttgtaactgtcaagggtatattgatttttttgtcgaaatggttcatatttcaactgacttttactaagcttattagaaaaagaaagagtctatattttcaccttttcaaacgaactataaaaaaagaatcttcgcgataatcgcgaagattctttttacggtatgagacgagtacaatctctcggaaaagcactcgcctctcgtacatttgttaattctaaaagtttatatacaaccctttctaacccaattccgaaacctccatgtggtggacaaccatatcgaaatgtatttaaataagattgaaatttatctgggtgtaatcctttttctttaaacgaagcgagtaacatttcataattatgaattcgctgtgcccctgacgttatttctaatcctttatataataagtcgaatgaatcagtaatagctggattctctttattcggcatcgtatacatcggtctcgcttttttcggataatgcgtaatgaaaacaaattcactattatatatttccttcacatatttccctagtaacttttcaccttctgtatctaaatcccctacaggagattctttacgatacttacttttcaaaatttcttgtgcttctaacaatgtaattttaggtatttcagtaataacaggtacttctatttgtaatagttgtagttctatttcacattttttcgctacttgttgaaacatatatcgtaaaacatccgtttctagttgcatcacttcataaaaatcatgaataaaaccaagctctacgtctaacgatatatattcattcaaatgacgggaagaattatgatgttccgctctatatacaggtgcaatttcaaaaactcgttctaacccacctgccaccatcatttgcttatagaactgtggtgattgtgctaaataagcttctttttggaagtatggaagcttaaaaacatttgctcctccttctgccccttgcgaaacaattttcggcgtaaagatccgtgtgaaatcgttctctataagaaattcactaaagctttgaacgagtgtagatttcactttaaaaatcgctgcggttcgctcatgccttaatgatattactcgctcattaagtagttgatctaagccaacttgtaacttctttttatttatttcaaatggaagtggctctgcactgtttattactttcacttcatgagcaagtacttcaacacccaattctgttttcgatgtctcgactatttcaccaattacgtggacgacactttctacatcaactttatatccagccaattcattttctaatacacattgaattactcctgttctgtcccgtaataataaaaaactaacatttccaagatgtcgaatcttttttacccatccttgaagtaatacaacctttccactttgctttttacattcttttgtgagtgaacgcttcattattgaatccattatttttccctccagtaattttatatttatttacgttattgttgtcatcgtcatcatccacggtcactcaccccctttcaaagaatacaaaaatccgcccctataaatagggacggatttttttccgcggtaccacccaaattgtcatactgaccatcttagccctgataacggtaggtaccgtttgcttttactaataatcacgttcaaagcaacactcacaggtgtctttccatcatgcggtatcgcaacctttccagcaactggctgctctctgtagacctttgcaccatgtacttttcctgatcatcactttttatatttacagagtattctaactccttatcttataaaacgcaagctttttttgaaacattctggttttataactcctaacttcttctaaagtgtgaaaagttaattttgtaatacatattcttatgtattacatccaaaattacacctttaatattttccaatttttacataaaaactaattcatttacgcatattaataaaaattttaaagcgaggtgtgtatatgcaaaaagcaattagtttctttctccttttgttttgcttaattgtagtaaacgaaacgtatgcctattcaccaaaatctttaccaatctctcaaaactctgatcaatggcaagtgaatattgataaaccgaaaaaaacaaacaagaatatgcttcaagctaaaaaagatgaatttcaaacatatcatttttcagtaaagaatgtcgggaatagtgaagtatataatgtaaacgtcgaagtattccgcaacgaaccaaataagaaaacgaaatatgaactcttttccctaaaggaaagtcgtttggcaagtggaaaaactggatttgaacacgctaatttacccgttgctacaaaagcagatgaagttgatgttattattacatggcaagaacacccattccgatcgatgcgaaatggtcaaaaagttgaatctagaaaatttaaagagcattttgtttttaaagaagctaaaaagtaaatgggatacggatatattcacactatcattgatatagctttatttactagtaccagttcttaagcaaattaaaaagtcgtggcttataatgaagtgcaccccaattgttagacacagtctaacaattggaggtgcattttttatgggctaccggggctaccggggctaccggggctaccggggctaccggggctaccggggctaccggggctaccggggctaccggggctaccggggctaccggttccactggacctactggcttcactggctccactgggcctaccggggcggctagtgtaggattaacaaactatctatatgtttttgatactactaaccaatcaattgcagtaggaagtagtgttacttttaacacaaatggacctataacaggaactgcccttagccacatcacaggtactggaaatattataattaatacactaggaacatatgtagcagagtttcaattacaagcttctcgcgaaaaccaattctccctcgaactaaatggtacaccaattccaggtgggcgttttggtacggggtcaccacattcaataaatcaaggtactgctgcttttaccgtaacagttgttccttcaacattgactttaataaataacacctcttcagcaggtactatcactctctcaaatagtgatggtggctctttaacaaatgtatctgcaagtataagtatttttcaggtcggataattaatttggttagaaaagtaattcataaagtttacaaataaaaaaatgaggcttctcttttctagagaaacctcattttttttattaaattttaaactgactcgtatacagatcaaaataaaaccctctatcttccataagagactcatgattccctctttctaaaattcttccatcctttataacaaggatttgatctgctttttcaattgttttaagtcggtgagcgattacaaaacttgtgcgacctctcattaaattatttagtcctgcttgtatttgtaattctgttcttgtgtcaatattagatgtcgcttcatcgagaattaatatatctgcatctgctaaaattgctcgtgcaatcgcaagaagttgtttttgtccttgacttaaattcgatccttctgaagcaatttctgtttcatattgatttggcaaatgcttaataaaagaatgtgcagatgctgccttagctgcagtgataacttcttcatcagtagcatctaagcgtccataacggatattatccataatcgaaccagcaaataaatacgtatcctgtaaaactactcctattttacttcgtaaagaattaatatcataatcttttatatcttttccatcaatatgaatttgtccttgctgtatatcgtaaaagcgagttaacaaattaatgattgttgttttccctgatccagtcgggccaactaaagcaattgtctctcctggctgcgctttaagactcacttcttttaaaatcgttttattctctgcatagccaaatgaaacattctcaagtgcaacatgcccttgtaaattttgtacaacaaatgcgtcttttttattttgaatttctggtacctcatccataatctcaaaaacacgttctccaccagcaactgccgcttgaattgtattcattaaagtcgcaaattgacttaacggtcttgagaattgacgagaataattaataaaagccgcaataacacccactgttgtcattccgtttaagaccataactgatccagtcccaatgacaagccccatacctaagttattaataaagttcatacttggaaaaataaaagctgaaaatgtatcagccttcgtagctgaaactcttagctgttcattaattttattgaaattttgtacagtttctttttcttttccatacaacgtcgtaacatccgcacctgtaattgcttcctcaataaatccatttaattcacctaaatctttttgacgcttcgcaaagtttttaccactatatgcaactagtttttttgtaacgtaaaacataataggtactgtaattaaagttacaattgctaaaatccaatttaaggcgaacatcgcaatcgttacacctataaaagttagcgctgatgaaataatttgtacaacactttgtgtcaaagcttggttcaaattatctatatcatttgtcacacggctcattaaatcaccttgagaacgcacatcaaagaaccgtaaagaaagcgtttggattttctcaaaaatatcttgtcgtattttttgaattgtttttaatgcaacgttaatcatgacaaatgtttgtaaccatgttaaaagtacagttacaccgtaaatcgcgataagtaacatacacattcttgctgtaccacttaaatctttcggtacaatatattgatctataatgactcccataaaatagggacctaataatccaagtaaagtagtaacaacgactagaaatataacaaacattagagcagctttttgatagcccatatagttccatatccgcattacagttccttgggcatttttagcttttcccatcttcggtgtgtttcgtccacctttattagcaaattgcccttgaaaattacgcatgttcttccccaccttctttatgcaaattaccaccttgggaaagataaatttcctgataaacctcacttcgttctaacaattgttcatgtgtaccattgccaactaattcaccattatctaatacaagtattttatccgcatccattatggaagaaattttggacgcgattaataatgtcgttgtgcctttatattttgtttttaaagctgtttgaatagtagcctctgattttgcatcaactgctgatgtagaatcatctaatatgagaatcggtggttttctcacaagtgcccttgcaattgatacacgttgtttttgtccacctgatagatttgtcgcaccttgtgttaaattatatcgataagattcttccagcttattgataaactcagtcgcacaagctgatgcagctgctacttccagctcatcatgtgttgcattttctttaccataacgtaaattctcttctatactacctgagaacaacaaagccttctgaggtacaaaccctattgaagcacggagtttttgcaaatcatatgttttaacatctattccatctatacatatttcaccttgatccacatcatatagacgtggtaacagtttcgctaaggtagatttaccacttccagttgatccaataatccctactttttcacctttttgtatgctaaacgaaatatcttttaaaacgtattcattatttttcgtatagctataactaacatttttaaattcgatattcccctcgattttctcaggttcgattgcattagctgcgcttataatatcaacctcggtatttaacacttgctgtacacgatccgcagatggaaaagctcgcgcaatttgaataaataccatgctaatcgacataagtgacattaaaatgatattcaagtaattaataaatgccaaaatcgctcctacttgaagcgttccattgaatactttttctccaccaatccataatgttgcgacaatcccgccacttacaactagcataatgattggcatcattaaagaaataagttgcacagctcgaatatttatcttcgttaaatttgtatttacacttccgaattgagcgatttcatatttttgtcttacatacgcttttataacacgtacaccagataaattttcttgtaactttgtattcactttgtccaatgcctcttgcacctttttaaatgtaccacttgctttacttgcaattaaaataatcgcaagtaataaaatcggaacaactacaagtaatattggaaataaccctcgcgctgttacaaaaacaataattatacttcccataaataacagtggaccacgaacgagaacacgtaatgtcatcgtcattgccgattgaatggaagtgatatcattcgtcacgatcgttaataatttacctgttccaaatgaatcacgattattactagaaaatgtttctattttcgcaaacacatcttttcgtatgtctgtagcgaaattaacagctgcttttgtagaatacatcatacacccaagccctccaactaaaccgagtgctgctgctcctatcataagaagccccatttttattacataatttaaatcccgatttgcaatcccaacatcaatgatatgttgcataatagtcggttgaattaagtccatcgcaacctcaagtaccataaatagcggtccaataatagcgaagaacatgtatggttttaaatactgtaataacttacgaaatgatttcatacataatctccttttcccatgaaattaccactgaataattcatatccctccttatttaattgatattttttgtaatttcttcattacttttattatattatgcaaattaatatttaacattattaaatgataagtattaatgactttctggtcaataaatgtgctttatattatgtaaatacaaaaaccgcattcttaatgaaaagaatacggttttttcatctatatttcttcaattgtaaaatttaaaaactcagtctcaaatcccttatttttagaaggactacacgtgtaaaaacctattttaataggctcattccctatatcctccattaaatgagcgattcttatttgttcccattgatggctctttttcacatatattgtataatcaccgcgttttcgaataattcgaaaacgaagttgttgcttagctgcttcagttggataatcttgcgttgaccagtcagaatatccattattcgttacgacagctcctaaatgagaagggccatctggaatatactctaatgaagttttcaaccaacacttttccgaaatcataacaaaaagacctgcttgatcgtattttgaatttggattcatacacaattgtacttcagcttgaaagtctgtcatcatttcattataaaatacatgaccattcatgacttcaaaaccataatgtgttttaagccaaaaatctgtttctgctttcgaacggacaataaacgcctgcttgtcattaattttataatattcagggacattcattatagtgagctgctcaacatgtttaggtatatatgatatattcatagttcctccataataaaacctttatacaaatatttaaaactccgctaatactgggaatttataacctttaaaatctaactctttatcacttcgaaccattaaatacttgctagactgtaattctgtaaactgtacatcctcaacccctaattgatccggtgaaaaataaaattcgatttccgtaaacctttcattgatttctccacataattcatctaaaaccggaagtactggcgcaaatactccaaataatttcaacttttcattgtctacttcataaacgattaaagcatctagtttctctgaataatacaatttctcattccattccgaatcatacatattcaaataaaatgaaggatggaagtttaaagttgaaaaactatttgaaagtctttggctactatcaatcgtttcatgtattaactgtctattctctatattatagaaatctaactttttaagtagtgaatggttattattaatatttttatcatatggtatagtcatcaaatattcctgcacaactttaaatccaaatgctgtatatagttcaggtttttccgtaaacaataatgcacattcacatttcttatcaatttcttctatcattttactcattaattgtgtcattagcccttgtctacggaaattagggtgtgtcattactgattgaatacccgccgcatttattttttcaccattaattaataatgggagtgaaaatgccgcaacatttgcaatcactttatcttcttgtaaaaatgataaagctttatatgtatcatcccaatatcctttatccgaaaaatcattcaatgtttgagttgtaattccaaacacttcttcaaataaaggaaataactgctctcttttcggttcttctattagaagacttgccaatttttcaacattccccatgttgtacctccaaatgttaaattccattaaattagatatacttatatgacctactcttaaaaatagaggtcttaccaatcaatatactatcataaaacataaaaaaaaagtctaattaattttatgtttcgactatttgaaaataagtcgaataaaaaaatattaagattttcggatattaattagtttattttataaaaatagcgctttctaattagcttttactaatagaaatacactatttataataaaatatttttattcttttatcccttcaagtctttccttcgtattaatttcttctccacttatacgcttttcaaaagactttctccaactatttgaaagtgcatttacttctaatatcctttttaccccttcaatattttgtttttccttatgcataatacggttagcgaatgctactgaaacaccttttggatcagactgtagtctttttaaggtgtcgactgatgatacccatccttcttttaatacacgaaaataaaatcctgtatatcctgtttcttgaaaatatagtggtaactttggaatattatatttttttgctaatttaaaacaaggttgccttggttgtgttacctgtacgattgcctgtcctagctcaaatgtatcaccaatacaaacatcctcttcgctcataccactaactgttatattttctccgaaagccccatatacaagatcttgattcaattctttttcccagtatggatagtgatcaccagtataaacacaaactgctttatctactcctccatgatgaattaagtcagcttgtccatccccattaaattttacaaaggataaatataccggttcctttacttgtttcttatttatgcctgtatgaactacctttccaccgtatgtaacctcttttggtaatcctatatttaaagataataattgatattcattagccattctatttcctcctttaaaggtgttacatgtattttctctcaattaatttttacaaccctctctgctatataaagatgattataaaacctttaaaatcattgttcaattcaattatttatataataatgataggtataacctattattatacttgaggtgattccaatcgaattacgacaacttgaatactttttagctgtttcaaaagaattacatttcacaaaagcagctgagaaattaaatatttcacagccttctctaagtcaacaaatacgtgcattagagcatgaagtaggaatgccacttttcgatcgaattggtaaaaaaatatctttaactgaagcagggaagattttattatcacatagtaaaaccatttttcatgaagtcgaacaagctcgttcagctattcaagacctaaacggattacagcaaggttccttaacaataggggctttgttaaccgtcctaaattatttactaccactaactattttaaatttcaataatttatatcccaatatagagctttctgtattagggcttcgcacaggagatattcgtgaaaaattattacgaaacgaactagatattggaattacatttctcccggtgcaagataaagagattatctctatccctctatacaaaagcgatcttacattagtcgtgccaactggtcatcgattagctgaacgtaatcatgtatctattgctgaattacagaactaccctttaattcttttacctaaaaatttctttttaaccgaactaattacatctcattgtcaaaaattcaactttaaaccaagaccaattttagaaattagcacgatggaatctttaatccaaatggtttccaaaggaatgggaattacagtgttacccaaaccatatatagactttttacaaaataaaaacattcaagctattaaaatagaaaaccctactccaacaattgaaatagggctaatttatagaaaagataaatatatgtgtgctgcaactcgagaatttattgagcaactaaaaagtacagtacgttctttccaaaactaaacaaaagagattatcctatgaaaccgtttcacaacgatctagtagaataatctcttttcaaaacaaagtaaacattatattaaactcttatagattttaatgtacctttttagatattggaatatatttagtaaaatatgcaccaactagcaataatacaattgaaaataaccaagtaaaagcaccgccaaagtgaaaccaatatgcaaacatatttaaaattgcgagtgaaaagaagcaaatagaagttaacgcacttttcaatccttttatcccagatttttttctcttttgataagcaatatacatcgcaataacaagaaaaaagataagaacaaatggtaacataacttttagcattggtaatccctccagtgtaaatgcactctcttcattatcatcttatctcatttatcttttaggcatcaattcattcttatcttccctccaaaagtcagtataagttttatttttaaagttcacgttcacctcagaaaacggcatacttcctccaactttcaatgagtaccagtcgtttaaaagtggtgatccgaaacaaatcttcattgtacgatcatgtaaatcgaataatacagaatgtaaagttccaaaccattcttcatagttatgtacagtcagtccatcaggatattcttcttctactaacttttttaaagactctatgctcacttgttcatatccatttaaatgctcatgtaaaacatgatatctctttgtagattgttctaatttcctattatttaatttctgaattgatgaactaactgcatggtttgttgatacaataaaagcttggttgtcaccatcaatcgttgttgtggatttatgaccgtcaaatatttcaatatgtgctgcgtttaaaggatcagctactattaaattaatattactagcaattggtatttcttctattagtgatttagcttcctgcacatttttacatttctccagcaacaatcgaattaccgcaaaacactgtaaaccatttaccattggctttcttaaacctgcaatgtttcctactggttgaccacatgctgaaaatgtaacagataatccatgttcgttaaccccttctgttcgaccaaaatattgagtagaaaagccactatgtgcatacgcaccttcaacatacgtcgagcaaaaacgcatatcatctattactggtgacaaatcataatttcttaatacataagtgtgagttgaatctgtctttttaggtaatactgcacaatgactacaacctgctttcaatagtgtttgatagtaatacatcatattttttgaaggaatttttaacacttcacaaaaaccttcaatttcttcattaattccagaacaatattgatttaatatatttctagattctgtccaatggttatgcgatattaagttttcttgctctataaattgcggaataagataagaatgttgtttcacaaattcaccttgttgcttaccaatttcataatgacttcctttgagcgatgaaaaatacccctttacttgatacatcaaattccccctcttattaaacatatccatatcgtaccaaatgaatcccattcattcttgatgttttttactaccttaactctatgccactttaaaacctccactaataattatttactaaataattatttttttgttaatatcgctatagaagctttacttcaaaataaaatagtttaatatcaaatgagcaaaatactatattgaacttactcgtaagcaatcatctaatttttgagattaagaaacttatttatcaaagcaaaaggaggatttatgtatgagcaattgcaaaccaattgatgaattaactattgaagacctaaaacaaaaccccatttgggaatggacaatagatgaagaggaaaacgaagaacatgacgaaacatgggtaaaaccagcagcaactactaattttacagaggagctaaacggttcaatcgtactaggcgaactattcttacataatggtgaaaaattccctatgatgtgtgaaattgacattgaaaataacgagacagtaattcgttctgttgtttattataacgaagcagaaaatgagtatattgctatagaagatattgtgaaaacggtcgaaatgccgttatcgattattattaacctaacaattcatgcagaatccaaaaccttacgcttcactgcacataaagtagatatttataaaaattcaataacgactaatttaaattaaagttgggcgaaataaagaaaacaattattaaataaagtgaagctttaatcagtgggggtcttactgcccagcaaatagcgggataaaaaccggaaaatgattatcgattccccggtttttcaaactagattaaagtattcccttttctactaaagtctctgcgatttgaactgaattccaagccgcaccttttaataggttatcagaaacaatccagaggtggaatccgtttggcatatcaggatctttacgtattcttccgacaaatgtatctattttcccttctgcatataatggcattggatacagctgtttactagggttatcctgcaaaataacacctggtgcatccattaatacttccttaatttccgtaacggttgcttctttttccagttctatataaactgattctgaatgccctgatacaactggaacacgtacacaagtagctgccattttcaggttttcatcttctaatattttcttcgtttcttgaatcatttttacttcttcaaaagtaaaatcattgtctgtaaatatatctacttgaggcagtacattaaacgctattgggtaatgttttttatcttttttcgccggtaatatattacttttcacttcttcaccagcaagcatagacttagcctgctcttgtaattcatgaatcgcatgaatgccagaacccgatacggcttgatatgttgaaacgataattctttctaaaccgaatgattttcgaatcggctgaagtgctgttaccatctgtaatgctgaacaatttggaactgcaatgatacctttatgctgctttaaagtatgcgcattcacttccggaacaacgagcggtacaccttgtgccattcggtactcacttgtgttatcaattacaatcgcaccactagaaactgcatgagttacaaattgtctagatacttctcccccagcgctaaaaaaggcaatatctacaccttcaaagctagttgtttttgcctcttttataattatctctcgtcctttgaatcttactttcttaccagcggatcgttttgacgaaagcaatgtgacttcaactatattaaacttcatttcattctctaacagttcaataattttttgccctaccgcacctgtagccccaacaacagctacatgatagcccttttttttcatcttttctcctccaatatcacctgtatgaatatttctacaatttcattttatacagaatttaatcatttggaaaattaaaatgcatgatataatcattcacaaatcatgataataaaagagggattgcttatggaaatgagacatgttaaaacattttgcgccattgtgaagtatggtaatttttctaaggctgcgcatgcgctaggttatgcgcaatctactgttacagcacatatgaaagctttagagaacgatttacatattcctcttttcgatcggttagggaaaaaagtgctacttacaaaagcaggtcatcaatttcatccttatgcattagaattactttcaatatatgaaaaagcgcaagaaatcccccaaaatacagattatttagaaggtacattaagtattacatctaatgaatcattagcggtataccgattaccacaattattacgtacttacaaacagaaaaatccgaaagtaaatatcgtacttgaaacaaacacaaatgaacaagcattacaaaaattacgtgaaggagaaacagacgttatcttcataattggagaaagtatagaacataatgattttattacgcgtacttttagtaatgaaatatttggatggattttaccagatcattccgctgcacatacaaatccattccagttattacaggacacccagttcatttttacagaacaaagctgcggctataggccaatggtagatcgttttttatgtcaaagtggaaatattccagctaaaacatttgaaacttccaatgttgaagtcattaaacaatccgttatgtgtgagttaggcatttcaattcttccttatatcgttgtacaagaaagttgccaaaaaggacaactatgttttcaacctatcgaaactccaacagttattcaaagttatgtaatctatcataaatctagatggatttccccggtattacaatcgttcctttccttacttgaacgagactaaaatattaagacgtacatagaaaaagagtaattgcctaataagcaattactctctttcattaattagtatactatttattagtctgtcccccacctgcaattaatttactacctgaatatgtacctttgttcataaacacttgattaattaattctttttgctcagcttccgacattactccttttccttctcctaaattcccactttgtaatttccaaatcttattatgatccccatcaaccttttcatattttccttgtttccatcgttctaaaatttctacatatgtacttccctgtacaagatcattactctttacaatatcaattaagctttcaatccgctcttgtgtaataaaaatatagccccacttttgatcagctttcgctttttgatgtgccatttcatgtaatgctgtctgtatattctcatctgtccatttaaaatttttattaaaaccactattcggcaatgaataatttccattttctaaaagctttgcatcttctgcttttacgttactatcagctaatacttctactgctggagcagctggtgatgcctttttcgcagctggtttactattatttaaataatgcagcataccatatgttaaacctactccaattaccgccataccagctataacacctattattttcaaaaatgttttcatctcgcttgtttcctcccaaatatctccgttctgactatctaattatttcttatataaaaactgttacttcattcaaaatatcgcatcccatcccctatcatattatttatatatacttcctcatattgtatttctttttctttaaaattgaaagattattctgttaaataatgaaaatattctacaaatttttcctttatatttataaagaaacaaaaaacaacgagggcgttctacaacactcgttgtttttactttatgcacgattttcttttaaccacttcgtaatagcatctaacttcgaaacatcaaaacgtctttcttcacacacgttcaaattttgtgagtttctcactatttctaattcattatttcttacactttttgcctcaattaatttacaatacccatctgtaacagtatttaaattttcataataacgctgaaacgattttgatatatgtaaatgtttttcaaagtttcttcttcttttcgtctcatcagatactttccgctttctaagttcttcatcgttcgtatataaataaaaatattgatccggaaagccaatttccctatttatcatcttttctttataaaaattttctattaaagataatggctgattaaatatatcaaaatgaaaacaccaattataactaagtggctgataaatatcgccatcgagtattactaattcatattgctttgacttctgaacagctatattccagcgctcaacttgtttttcaaaataccatgttctatgttcattttttggcctttcaaataaagaattcacttcaggtattatataagcaccataattcttttctaattcacggcacgtggtacttttaccaacagcgcttgctccctcaaatgctattatccccatagtttctccctctttcattaactaaaatttcgttgtttcgcttttcttccccataactttctccataaaacaattgaagcgacagtgagcatgattgttgtaatgatactaccttcaattccgaacgcgcctccatgcaatgtttctggtccatttgttatagacttaaaaattggagtagaatatacagttgtgccactaactgcaaaaccatatacattatattgagcccagttccaaattgagtgccatgcacatattccccacagaccgtcttctttcaatacatataaagctgcgaaaacacccactaatattatattcgatatagataatattgtaattcctggattaagtagatgaagaaatccaaataaaaatgaagttacaattattccaacccatatacgacttctaacagaaagaaccgggaataaccaacctcgtacaataatttcttccgttgccccttgtattaaaaatgcaactagagatcctgctattcctactatcactgttgaggtaatatgttgtacttgcaatttcacactccccattaataatagtagaataactggcgttgaaataaataaaaaccctattaacgcaccttttaaatactttctcatccatttctctttccaaaagccaatggatgaaaaaggtcttttttctacaaaacgaacccatataaataaaataaatatagctccgccaaacgttaacaccattctaacattgtcataaatacctttcatgaatatcgtttcagctttcggtaaaaataacataaataacataaaaagttcgcctaaagtcaaaaatataatggctaatattacagcaaagactggatggaccttttttctccctgcttttgctgcttcaattattataaatgaattatttttcactttcttttctccttttataatatttaactaccaacagtaaccaaccatattttaccacgaaaaatatattattaatatttactctaagtttttcttacatgattttgcataaatcccaattaggaataatatataaataaaagaggtgcctttgtgcctttactattatcacccagattactcagtggtattaccagcacttgctatttcccaccatttgttgtaagatagtaattaaggtcaatttaacactatattttctttgcatattatcaagtatcaatcagggacagtttgtactccttatgggtttttgataatatgtgaaattttattttcattcaaataaggccgatcatattgtaatttttctacttttaggaggcattaccatgacattaacaggtaaagtaaaatggtttaacagcgaaaaaggtttcggtttcatcgaagttgcagacggtaacgatgtattcgttcacttctcagctatcactggcgacggcttcaagtctcttgacgaaggtcaagaagttagctttgaagttgaagaaggtaaccgcggacctcaagctaaaaacgttgtaaagctataattcaaacaataaaaaggttgttaccagcaaggttaacaacctttttaatatataactaaaattttttacataaaaggagtggttacatgtatcgcaatcgaaagaacgatgtagcagaagtaccaccagaacaaacccctgtttgggaatgtgaatcagaggattgtttaggatggatgagaaagaacttttcatttgaagaagagcctaaatgccctttatgtaaaagtagcatgaaaagcggagaacgtttattacctaaattaggttaatttataataaaaaaaacctcttttaattaagaggttttttttattataaatttatgtcctcaacatcagttcgcactatagaatacaacaatgcatcgtgttgcttatttccttgatgaatatatccgcgcaatagcccttccttttggaagccaattttagataacattctacaagaagtaacattttcaggatatgtaatagctccaattctaaacaaacctaaatctttaaatccataattaataatttctccagctgcttctgaagcataaccatttccccaatagcgaggatgcagatcatatccaatctcagatcgtttactccataattgtaaattgtttagtccaattgttcctattaaaacgttcgtttcttttaacacaattccccatcgtattgcctttttctcaaagtaattttttgaaaaagattcgatcatacgtgaagcttgtccaaactccgtaaaagaattcataccgtagtaacacgtcacttcatccaatgaaaagatttcatatattttttgacaataagattgttctatttcaactaaacgtaagcgttctgtttctagtataggaaatgccataggatcactcctttctctctactcattcattatatcagaaaaaatatgtataattagtaaagtccttattgttccataaatcaaacatttctaatggcacattctctcttaattctatatacacgaattagataccttctgattgcacctcaaacatgacgctataatttccataaatcgaattttaaattatcaagaactgtaaagaaattgtttcttcattttctccttctaaacaacaaacctaccccttacatttatggtaaaatatagttaatatattattttattgtggaggtgaagatttcctatgtatatattcatcggcttatccctcttactcatattacttatttttttattcgcaaaaaaattcacaccaaactcattcatgatgactagctttaaaggtaatagctttaggacattttcaatcggtattttaatcgctgccatactctcactttcatatggaacttatcatgcggtaacatatcaacctagttatttagatattaaattaaaaaatcaaaactatactgttttcggtaatataggcgaattcggttatttctccgaagaattattaaaaaaagatacagaagtacaactatatttcgtctcttggaaaacaatacagttaaaaaatccggtaatacttatagaatatccttcaggaaaacaagaaacatggaagccaaatatcgtatcaataccggtaaataaattacaagaaaaacatgatataaaagatatttatcaactatcaccgtattcatttaaagagtctggagaaataacattaacattaaaagaaaacaatataaaaaacaatacaatttccattcaaataaaataaataaaaactgttcctccattttgctgaaggaacagcttttatttattctacagtattatttatttaatgtagccattatttcattggctatattttttccatttccaatacacgcaccaattccgacaccataatatgaggcaccagctaaatatacatttggataaagattcgtcattttttcttgcaatgcttgaaccgcttgattatgttctaaatgatatttcggcattaaatctttccaatttgtaacttcgactacttctggttcacctttaattccgagactcttttcaatatcatataaagctactcgtactaattcttcttcactataatttttgattgtttcatataccggattggtgctcttataaaacattcttactaataatttttgtttacccgatgtatgtttccactttcgacttgtccatgtacaagcatcacaatgtaaatcactgttttccgttacaataaaccctgtgccgtcagctggtagttgttcatctagtatgtcaaatcctaagtaaatacttataagagatgagtttttaaatgtattaaactgctcatttaactcattagactgtaataaagtttgtgctatatcatgcggagctgctaaaacaacataatcagcttgtattgtttcatgatttacaaaagaaatctcatatcgatcttcttgtttacttacagccgtcgttatagcacctttttttacgacagtttcagtgagcacttcttctaagcgattaattatcgtagatagtccacctttaaatgatacgaattttttatttcctgctgattgaaattgttttttattctcttcaaaacctttaataatacttccatacttatttttataatccagtaaatacggtaatgtagatgccattgtaagctcattcaatttaccagaatatacgcctgaaagtacaggagcaatttgtctttccactaactctttccctaagaaactttctaaaaatagagcaagtgatgtatctttcgtaaactctttatttttcgttatgaaatcttttaaagctacgattttccctttcgttgagactagcgtactgctaaacaaagactgggcgctcatcggtatcccaaatatagtatcagaaggaatcggatgtaacatgttttcagaatatatgtaagaaatacccgtttcattatataccatttcatcttctaaatttaaatcttttacaagtggcataacatattcattacgagcaacgattgaatccgctcctgactccataatgaaatccttttcttccacactatggattttaccacctaaatactctgctttctcaataagaattaaatttaaatcgatattataatccttttttaatttttctaaataaaacatagtagaaagtcccgttatacctccaccgataacaacaactgttttcatatgtgctgcgctcctaaccgatacaattaataattcctttttattataaccaaaagtccttatattcgactagcaagttgcgcattctgtaaaaaattagacaatatatttgaatatattttcaaattacctaataaaaaagaactataacatatacaaaccacgtcatagttctctttattttaaaaacataaagtaattgattaatttgtctagttcttgactcaatgccaatactttttcatgttgaattccataatccgatactaaatataaaagttcttctttttttatttcaattactttttccaatttcgctagttccatgtcgttttacatctctccaaaaataaaatgtatgtatttcagtatagcctacttacataattagtaaaagtaaaatacgcatgtaaaatcttacatatttgaaaaaataatatactactaacaaaaaaagaaactagattaagcttccttttacagattattgacgttcattaagaatgaataacataccggaatttttctaatgttatatctttataatttggagctctctttatatgattaaaataactagcaattgcagctgctccaaaatgcgcatgccaaatatcatttgtttcttttttacattgagaaataattgaaaggccgccttttaaaatacttttgttttccattttctttctcctctagttaaaatcactatattttcatcctaaagatggtgtcagtacaaataaaatgtgattcgattcatcacttttattcaaaaatcgatgcttcacatttggtggaatacgtacaacatcgccttcttctaaaaaatattcttttccctccaattctacatacacttcccctttcataataacagcaatctcttccttatcttcatgggaataatgactttctgttgtgtttgcttgtttatttaaatccatcattaacatttcaatacgtgctttcataaaatcaggtgttaatacatcatatacaatgtgatcattgttttcccgatatactttttttcgatcttttttcttagaaatgagcgaatctgtatcgatatcattaataaaaagtgtaaacagcggtacatttaatgcttttgcaattaactccaaaacatttaaagaaggattagcatgtcctctttcaatttggctaattagtgacgtactaatccctgcataatcagcgaattcacgaattgtcatattatttttcttacgataacttaatactgtttgtccaagcctatcatgtatcatagtaaaacttcctttcgtccatcataatgcatatttcattgtctttgtgctgacatactaaacaaaggcaaataatcctttcctattatctccgggacttatatacttacttttgtacattatatcgcattaagtttattataataaacattctatcggagggacaaactttgaaatcacctattctttcatatttcatcttattttttggtgtattcgccttatcaacttcagcaatttttgtaaaattggcagatgctcctgcgacaatcattgctttttaccgattattctttgccacactgatcctgttaccgttattactatttaataaaaatagtcgaaatgagctaaaaactttaacgaaaaaacaatggacattcggattcacatctgggctatttttagctgcacattatgtactatggtttgaatcattacaatatacttctgtagcaagctctacagttatcgtaacgttacaacctttgttctcaatgattggtggttattttttatttaaggagagatttacgaaaggagcggttattggttgcctcatcgctatttcaggtagtatcatcattggctggcaagatttcaaaattagtggagaagctttatatggagatattttagcatttatcgctgccggtatcattactgcttattttttcattagccaacacgttcgtaaagatttgtcacttataccatattcggtaattagttatggaagtagtgctggctttcttagcatatttgctttcatgcaacaagaatctttcatccattactctacacaaacttggttgtgctttattggattagctttcattgctacaattttaggacaaaccatttttaattggttattaaaatggatgagtgctactgtaatttcaatgagtattttaggtgaaacaattggcacttgtatgctagcgtactttatattacatgagactatttctttacaacaaggactaggaattaccgttatttttattggtttagtattatttttattacagccaaattctaatgaaaaagcatgacagtatactgtcatgcttttaactattcattatgtacaattaaaccattcggtctaaaacgactcatcataatttcattaataaattttccgtgagctttcaaattccctatctttactccctcttctacaaatccaaatttttcatataaagcttttgcttttggattcgtttctaacacacctagttctactctctctaacattaaccaattatcagccagatcaagcatcttcataagaagtgctttcccaattcctttattatgatattcactgtctaccccaatgaataaatcgcctgaatgagatcttcggcccggactttgtgttaaacctacaaatccaacaacttctccatcatattctgcaacaaattcaaattgatttggtgctaaatttcgaattctattttccatagcttctacacgcatgctaggtaagaaaaccatatacggtaaaacgtcatcctgtatacatatacgatgaattgctctagcatcttgtatttctactgctctaacgttgatccccatctttctctcctccatataaataacaatatatttgtttgtgtgtaattctagaaacgtgtatgaatgaccttctcactcgtatttctttatgtcatttttacataattatttcgatataatacttaatttccaaaaagattaacaactatatggatttggttaacttttcgcctcgttatataaattaagcaaattttcaattggaataccatttagtttcatgccgactatattacaattttctatttcaatatttttcagattactattacttatagtgctgccttccaaatcacatttatcgaatacaataggttccttctcatctccgagacttgtatttttaaattgcactccacctaaagtcaccaaattaaatttactgccagaaagatttaaatctgcatatgatgaccatctaaaatttatatttctaaactttgattgacttacattacaattactcatattcatatttattatattgctaccaacaaatgaactgttttttaaattcacttgataataccctgtattcgctaaattacagttttcgtattgactatttttcatatctttatttgtaactacactctctttgtttgagcttgtttttattcttttcacgtaacaatactcatcttccgattcaaaaatcatttggtagcccatctttttataaaagtgatgattattaatttgtctactagatgtttcgagatcccaaatctttatgtttggatattccttttctattaatttcataacatgtgatccaattccttttccttgataaacaggatctacaaaaatacgatcaattcgaccgtacgacttaccagaaatcgtaactattatccctccaattatttctttatccattacaactttgaaagaatccaattcttcaatggaatattccatcatttcaactgaagagtaccctggcggttgaatgttataatcaatgacatcatcttggccgtatagccattgttttgcttctgcatcaaatgttcttttcattatttctgttaatttctcagcatctaaaattgtagctttttctatagatattctcgtcattttcgttttccccttcattattacaaaccaaccattttgtgaatgccataattatcaattcacttttatttttaatacttttcccattattacatatggaacatcatttttacttggatgaaatggctctaaaacatttacccaatctaatctttcatataacgaacgtgctttttcattgtttatttgtgttgttaaaacactcgttctatttgaaagcccttctagtaattcattatgtaatttcgttccaagacctttattttgatattgtgggtgaactgctaactctacaaattcaaaacaatcttgcaaccattcgtctacttgctctagatgtaacgcttctctcattaattgattatagtactgtccctcgattgagcgataaccataagtaaagccaactacttcattttcatcatttattgctactatacctttaaaacctgtatattctatatgcctattcattcgctcgatcatttcattgaaatttattttctcaaatactttacaatacaattttgccatatcctcaattaagatttcatctttttcaatgcttacgaatttcactttattcccccctgttaaacatttacatacttaaaattttaaaaacaaagaaaattaatactaatcactctctttactattaaactacaaatcatcctatattttccacaattacttagtattaatgaataaaagaagagaccatgtaatatcaacatggtctcttcttttattcattttcaattttattccgctatttgccgggcagtaagacccccatctcaaaattcagcgaaagcaaagaagttaggtgggggtcgggctaataatcagcgggggctgacaccccactgattaaagtttcactttatataattaaaaattagatattacttaagccaatcgttgcaagtgttacttaactgctgtaaatcttctataaattgactcgcatcatatccatcacaaaccgaatgatgtacttgcaatgaaactggtagcataaccttatttccttcgttaaaatatttcccacaagttataattggcaatagaaaattttcatcattattaatattaagattaaatccagtaaaactagtccaaggtatgctagaaatcggaaatacattaggaggaatattttctttcgtgaaaagaccatgaacactagcatagcatctcatatcgtcttcataatttttatagaaagtgcggaaatcacttgaataatccgtccatatacttgaaaaagacttatcatctttatgaaagattgtataactcggtatcatttcctcccaatagcctaaaactccttcatcgttaaaacatgttcgaaattttttatgattatttactactctagaaattaaatatataaaaacgggataaaattttattcccttttgatatactttctctaataacatcgtgatatcaacattaacagtcatactaaatgtacatttcaactttaaataatgctcaaaatactgctctctattccaatcttctctatcaattacatgaaacttcattctaatagcctcctaaaattttctttttattttagaaggctatttcccttgcttcaccataattgttcactcctaacagtttacatttcaccctaattatttatttaattatataacatatgtaagaatcaattcacatatttcttgaaatccatccacatactatagataaatcaaatgaaatttggaggatacatacatgaataacaaaaatatgaataaaaaagaaaatgttactgaaaatactacatctattcaaaataataatactgcaaaccttactattgaagaacaagcaatgaacggcttatacggaatgcccgaaacaacaattgaagatgctgatcacgctgcagctgatgatttgacttcaaaaaattaattaactacattgaaaaaagccaaggaaaatacccttggcttttttaactatgcatccaccttttgtatttcttcactctttcttgaaagtttacctggccaaaaagcaaatcggcctaacacaactgtaattgcgggtacaagtaacggtcttacgataaacgtatctagtaatacgccaattgcagttacaataccaaattgaactaatacttgaattggaagtgtacctaacactgcaaaagttcctgctaaaattaaacctgccgatgtaataacactacctgtttgtattacaccattttttactgcatccaagtgattttgtgtctttctgtttttccatatttctgaaaccataaagatattataatcttcacctaaagcaactaaaaatacgaatgcgtacaacggtatcgcaccttgaatggccggcgctcccataccgtaatgaagcaatatccatcctgctcctaacgctgagaagaatgataaaacgacagttacaattaaataaatcatcgcaacaaccgatcgtaagtagacaagtaatagtaaagcgataatgctaatcattactggaataattactgattcatcacgttcagtaatttgctttgtatcatataatgaagctgtttctccaccaatccacaattgctcttcagcattactaatcccagcatcttttaatactttttctacattacttttcaatttaggaatttgatctaacgcttcaattgagtatggattttccgctaaagaaacttcatacatttgtatttgcttattttcttttccctcttttggctctttcactgtatttatgaaagaaaatttctctagttcttgtttaataggaagctcttttcctttcgtatcaacaaccacttttactggtgctagttcaccagctgagaaatgatcactaattaacgtaaacccttcacgagaaggcatatcctttggaaacgattctaataagtcatatgtgtattgaatacgtggtacgaacgaagccaatccacctaatacaaacacagttagcataattattgtccacggtcttcgtactactacatctccaagttttttactaaaggagccttttgatttttcaacttttacagccctctttttctttcttgcaaactcctcattcattgaagttgttctcggtataaacgggaaaaatgcaatcctaccgaaaattaataatagtgctggtaaaatcgttaaagccgcgattcccattataaatacagcaacactaaatggtactgcaaatcgatgaaaggcaccataatgagcaagtaataatgtccctaatccaagtacaacagttaacgcactcattattattgcaccgccagaagctttaatcgcaagttgtaatgctttatatttactttcttcttctaacaagtactctctatatctcgaaattaaaaatagacaatagtccgttccagcaccaaacaataatactgtcataattgatatcgcttgggcatctactttaatccatccgtgatcagctaaaaaaccgagtgtaggactaatgataccgtatgcaaagccaacaacaagtataggtaaaattgctaaaattggcgaacggtaaagcaaaattaataggaccaagactaataatacagtagccactaacaatttcacatctgcttgactaaataaactaactgcatccgtttgaatacctacaggcccagataatcgaacatgtaaaccagattcacttattttttgtttaaatggatcttcatccaccttactattcactatttttctaaactcttccagatttccttttaatatatccgtaccagcagatttattaaagaatactggtgtaacaaatgatgtaccatcttttgatgcactttttgataatacttgctctggaattgtatcaaatggcggtaacgttgattgttcttttaaaggactagcttttaactctttataaacgtcttgtatgagtttataatcctgtgactgtaatccaccatctctataccatactactaacaacggattccctgcattattcggaaactcttttttcataagcgcttccgcttgctgtgacatagctgtttcaggtaaattttttggattcggttctttcgtactgtttacttgtggtaacgtaaatgaaagtaataatgtaataagaacccacaccgataaagtgatccattgcatatttttccctgctacaagcctccctaacatatgtaacgggtgctttttcataaaaacccaccttccttttttcctccattattaattatatatactggtcggttaattaatcaagaatgattgaaaattatgttataattatctcaatcataaatgtcaggagcgaatgtatttggaacaaaaacaacgtcctctcggaaggccgcgtcaaaataaaaatacaaaatctacaaaagaaaccattttagaagtagcaacccgcttatttcttacacaaaattatcaagtcgtttctatggatgaggttgcaaaagtttgtggtgttacgaaagcaactgtctactattactattcaacaaaagccgatttatttaccgctactatgatcgaaatgatggtacgtatacgtgagaatatgtctcaaatactctctacaaacaaaactttagaagaaagattattagacttcgctaaagtttacttacacgcaacgatggatattgatatgaaaaattttatgaaagatgcaaaactgtcgttatctgaagaacaattgaaacaattaaaaaatgctgaagataatatgtatgaagtactagaaaaagcactcgataatgcgatgcacatcggagaaattccgaaaggaaacgctaaatttgcggctcatgctttcgtatctttattatcaattgggaattttaaagatgaaaatcacaatcctattctggcaaatatagatgaattagcacaagaaatcgtttctttttattggaatgggttaggtcattcatattaaactgatttactttaataaaagagcatatttaattttttcaaacatgctcttttataatttatttatatactaataatcagattatacttcaacgtcacttaacaaaaaactccattttaactttacaaattttgaagttgaacatttatattctccttacttaatcccccatggtaacaaactacagattcaatatgtaaatttaaatacttcttcaaagactgctttgcttccttaatatttatagttgttggggcgtgaattcctcctaacatcccattcacactatacatagagtctcctgcaataagaattttgctttgtttcaaatataaactaatatgacccggagtatgccctggagtatgaagaattagtattccaccacaatacggaagttcttgcccgtcaatcacagtatcactcacttttccttttgggcggttctctacatttccgtccttcaataaaggtaaatccccctcgatatatggcttatctagttcgtgcgcataaactttaatattacttcgacagcgctgcaacaattctggcagactacctatatgatcaatatcctgatgcgtcaaaatcacgacttttaacttatcaaatgataccccaaccttttccatctttacttgtatatcttcaatttgtcctgggaaacccgtatctattaatactgccatttcatcattccataaaagaattggatgaataacaaattcttgaaattcaagttgtaacatttctactcctttagcaatctccatacagccattctcctttatgttgaagtttgaaaatatgtacaagtaaactgaaaatataaagtgaaactttaatccgtggggttttactacccgacaaatagcaggataaagcacctctatcttataatatgttttgtcatcccaatagagaatgcttcaaaccctatagattcatagtaagattgcaatttttctacacacataagttgtggaataaccttgttttgttcacagtgctggattaatcgtttcactatttcttttccgatgccactagactgatattttggcaatacaccaactccacaaataatgcctgttatgactccatctgatatgacacgccccatccctactaacctcttatcatcaaaaacataaattgcataccaactttgcttacacattcgttctaactcgttaaccgttaatttaagagaattccatcctaaagattcgtataaggataataatccattaaaatctgtagggtgttcacttgtgtagcgtatactattttccatgtaaacactccctattctctagcttgtttatatttcataaaattccctttacacaaatctgatcgatgtaaaaataactagaacaaacttcaataagaaagatagaattccttctcaatataaaataaaaagaagttatctcacttaagataacttcttttatataagactctcattatattatcaaccaaaaattatacaactacatacgataagcacaaacaaaactaataaaccatttgagaaataacccattaaatactacccctttattaaattatgtaaaagattttatcataaaatgatttacaacttaataactgaaaaagacattgtattcattagttatatacgtttagtaatattttatattcggttatattctcgttccctaaaaccacttctcgcatcctcataattcagtccacataaattcaaaaaacagttattagtaaacattcatttactataaagagtaattttaattgatttatattgaatttagtaataaaataataactaaactcataaaggaatcaaaaacaatgaaccaaaacgaattattaaacgaatacatgaatttattattaaatatgtcaggtacttttaaattactatcggagaaatcctcagaatttacacatttagaacaacatgtagtagagtatatcgcccagcaaaaggtgcctgtaaatttaaaaatgattgctagttatttaaacatccctaaacaacaattaagtgtaacagtacgtaacttagaacaaaacggatacatcataaaaaagaaagatatggtagacaaaagagctatattaatctctctgacagaaaaagctgaaaaagtacattatgagagatggaaacaaatatataataatttcacagtaaacctcgaaaagttatctgaagaagataggcgggatttaacttatggactatataaaacaaatacaatgctctcaaaaatgttaaataacgactaaatatattgtttattactaaacggaggatgtttcatggctaaagaattagatttacaatccgtgcaaggtacgatgcttattcccttatggggaagagcatatggcagtgagaaaaataaggatattttagatgatatagaggctattcgaattattaaagaatgtaattttgacttctcaacaatagcaaatatatttggcgaatacggatgtatcacatacattacccgtgcacgaaaaattgacgatacgataaaacaatttataataaaacacccgaatgctactattgtaaacatcggttccggactagacactactttttcaagaatcgataacggtacaatacattggtacaaccttgatttgcccgatgcaatctcttttcgcaaaactttaattgaagatacgcctagaaatattagcattgctaaatcactatttgatacttcttggtttgacgatataaaatataattcaaacgacggtattctttttatatcagcaggtgtgttttattactttaaagaagaagatttaaaaaagatcgtagtcgctatgtcaaaacgtttccctggaggagaattatattttgacgctgaatcaaagttcgcactgaatctttcgaatgctactgtaaagaaatccggtaataatggtgctatgatgtatttttacgtaaacaatccaaaattaatagaaaaatggtcctctacaataaaagtattaagctgctcccctttctttaaagatatacctacaaataaagattgggacggtagtacgcgtataatgatgagaattgtaaacttaataaaaatgttgaagtttgttcatttacggttcaaaaaataataagtaaagaagagctcaatacatttatacttaggttataaatgttaatttcaataaaatcaaaggcagaaacataattgtgaagtgaaaatttaatcagtgggggctttgctcatcccccactgattattagccctcaccaatcgagcttttacggcagcccgaaccccacctaacttctttgctttcgctgaattttgaggtaggggtcttactgcccgacaaatagcgggataaaatcttgcatgcactttacgtaggagctaaaatgttgaatctcaccgatttccaaatcatgtacaccatcttgcaacattaactgattcatttatcctctctcctcatcgctcacttattactatctaaatgtataagttctgaccattcacacttttcccctttatatcctttagacactatcctcatttatatgaatagctttcttattcaaaaatagatttttaaaaattcctactcccacaattaataaacctataccaactaatttatttatttgtaatggaatgctctccattccaaataatccaaatgtatcaatgcataacgcaacaaccaattgagtaataagactaattagcaccgtatatgctggacctagactctttattgcacccattatacaaataattaacccgataccaaacagtccacttacataaaacaaataatttgcagtatacactttaatgctaatactgttttctgtaatgatataaaatagaatagagctaatgagacctatcccaaggacacatgtagttattaaccactgtcctacattttcatttacttttgcattaaaaacagattgtacgctaattaatattcctgctaatatagctaaactaaatccaatcaaaatcttcctctccctttcattgctcatatatattatctttagcgacttccttcattctagaaaaatctttaattacaataactccattactctttttaattagtttttcattataaaatctttgtaatacccgaattacgtgcctataacttacccctataaaatctgcaatactcgttactgaagttgcatccaaatcccctttatacatattcccgttactatctgttgaaattgaaagcaaataactagctacacgtacttctacaggataaagtaaattaagagcagtaaaacgagtcgatatttttaacgtgttcgcaatgttttcaagcaagaacttcataaatataggatcatgtaataacttgtttctaataaccgtattagaaatagagattgctacaacatctgaacaagcctcaacgatattatgtgctttgctattttgaattaattcaatatcaccaacaatggccaatggattgataaagcgaaggattagtttcttcccttcaggtgtaatcgtgtaaacttttactttacctttaacaacaaaatataaacgatccatttcgtcatctatattgcaaataagctcgcctttttcaaagtgatttaattgaaaataagctgtatctatttctgaaaaaatctcgagcgttttattggttttcaaataatgcgtaattaaacctgatctatcctccatattcatttctcctttcatttacatattaaatacaacaatacctataatcattattattgttcccacaatatgatatctctccatctgtatcttttttatatgaaatagtcctttcatttcaataactgttgccgttaacaattgagcaaccataagtgtgccagctgtcaatgtaactcctagtgcatatatcgccatagtttctgcacaaataatgaatccaccaaatgcacccgctgctaaatatatttttttcacactctttaaattcgttattttctcttctttctttaacaaaaatacagttgttacaataatgaatccaattaaatgggttataatactcgtcgaccatataccgatatgtgaactaagtttcgcattaaaggttccttgaagtgttataaatatccccgcaaaaacagcaaatataatacctttcaaaaaatcatctcctcatcctttatttctgacttaattaaaaaccatcatcctataatggcaaaaggacaaatgtcacatcactatgaaaacaacttggaatgaacaaaaaaacacacctcaaaaatgcggggtgtgtttatgtttattatttatatataaagttttataaatttaaattacgctacattaaaatatttctttttcataacaaactttgtaaataagaaacgtacaagcggtcccataataattaattgtaatggatatgccattatgaaatttttaataaaaatcgaaaaataaatggaaacaaatgaatctccttgtagtccaccatgtaaatacatcatagccataccgaaaaatgacataaagaacaccattccaattaccatagttgtcgccattgcaacgataatatttatttttttagatttatcaaatggcaatatgaatacaatttttttcgcacaaggtccaacgatacatatttcaattaatagtgcaataataaagccaattaatagttctaatgcaatctctttaatataaattggtcctcctgtttcattcattagtaaattgtaaaacgtcattacgataaccatcccaaggcacatcatcatgccaaattggagtttttcctttcttgttgttggcaaatttcatcatcctttctctttgagtctttgtcattatatcgacattggaaacctcttcgtaagtgaacattttgtgaacaaatttaaaacgttttcattttttcctttctactcaaattctcacttttacttatagaggttatatatatcgcaatgttgaattactaaatttaacattgcattacactattactaggaggataaccatgaatgaagcagaattttacgcatatcacatcgtaacaaggaaaaaaatgcatatcggacaaatcattctttttaacaaaaatcaacacaatactctatatcacttcttttttgaaagagaacaattaaatgctagtggtgaagatggcatacaaattttaaataaacactataaaaataacgaattacatataaataatgaaaatactaaagtagttatgagttatatggatcaaacaattagagcagttagagaaacaattgtagaaatggttagactacaagaattccctgaatacccttccaggttatcttgtttatacgcttcaaaaagctatgaagatgctttaaaatggaaaacattatttgattcttacaatcgagaagttttacagattgttaaactacgagtgattggaaattcttttgaaggtgacgggaatcttttaccgaaagaagatggaattcctttttctcaaaaaatcgaacaagctagagagtattggaaaggaaatattagaaatgatcttcctgagctactgattaatggagaaattgaagtggtggaaattattgatgacttttcctcaattcatatttaatttctaactaaatcatataggatggagattacaatgaagaaaaaagtgtacttcaatcatgatggcggcgtagatgatttaatttcattatttttattacttcaaatggaaaacattgaacttacgggggtatctgttatcccagcagactgctatttagaacccgcaatgtctgccagtcgtaaaattatcgatcgcttcggcaaaggtaatattgccgtagccgcttcaaactctcgcgggcaaaacccgtttccgaaagactggcggatgcatgcattttatgtagatgctctaccaattttaaatgagtctggaaaagttgtaacacccgtggtggcaaaacccgcgcatcatcatttaatagaaacgcttctacaaacggaaggaaaaacaactttattatttactgggcccctaactgaccttgctcgtgcattatatgaagctcccataatcgaagataaaattgaacgcctcgtttggatgggtggtacatttcttaaagctggcaatgtacatgaaccagagcatgatggaacagctgagtggaattcgttttgggatcctgaagcagtagctcgtgtatgggatgcaaaaattaaaatcgacttagtgacactagaaagtacaaaccaagttccgttaactataaacatacgtgaacagtgggcaaaagagcgaaagtatattggtatggatttccttggtcaatgctatgcaatggtccctcctctcgttcacttctcaacgaactctacttactatttatgggatgtactaactaccgcttttgtcggaaacactagccttgcaaaaactgaaacgattaatagtatcgttcatacatacggaccaagccaaggacgtacagaagaaactactgatggacgacctgtaaatgtcgtttatgatgtaaaacatgatgttttctttgaatatattactgaattagcaaagaaagctgctacttaaaacctcaataacacgaaaaaatttattaagaatgatatactttaattaatataacatgaggtgataagatggattatgagttactaaaagaacgaatagaaattataacttctagaattaaatacataggtggtgaagttcaagaagtttgtatagatgaaccatcttcccttgaacaaataatccaagtagaagaaaaactgggtattaaactaccaaatagcttcaaaaaagtacttttagagttctcaggaaattttagcttacgctggtttttacctgatgatgtagagctaccaaatgaatttactgatattttttgcggaacaccccactggagtttagaaagtctttctgaattcgaaaaagaacgtaaagacttggttgacgagtttttttcaaatctagatgatgaatatgatgtagtttggcacaacaaattagcattttgtgaagtgggaaatggagattatttagcatttgatatgaaagatgatatagatgctccgataatttacctaagccacgacgatggagaaggacatgggtataagattgcgaataatttcattgaattcattgagaattggtcaagggtagcttttgtaggatgcgaagattggcagtggttacctttcactaccagttttgaaagtggtgtaaatccagatgatgaaccagccaaaaaatttagaaattgcttggaacttaatatttaaaagagtattgaattaaatttcaatactctttttgtgcaatttaattatatttgattaatgtagtgtcttacagattattcatttcataaccattgacaaaatacgttattgtttctaactcatctgcatttaattctctatctagctcttgtttatacgctgcctttatcttctcttcatcgcctttatgagcttctgtatatgttcctactgtttttagcaaatgaatttcttgtaaaaactcgtctcgatttatagctgccccatgagaaagaatatatgtctcagcatcaaatttctctaattcatctatcaatttaaacgttcttttcgtcgtatagttccactttgaagaaaaaatatctgcatatatacaatctcctacaaacaatatcttttcttcttttatatacataacaactgaatcatgcgcatgatctccgcccacatgttttaacacgcatgtcacttcaccaaggtctaattccatttgatcctggaacgttaaggttggaggaataatgttaatatttctcgctttttcttcaaactctttcttaatacaatccgcacaaaatgcaatttcagtaccctcttttacgcgtgcgtccaacgcttcatctgtccattcataagatactattgcctgcatttcttttttcgtttcagcctgcgaaatagttaatgcattctgtaatacagataatccaaaaatatgatcccaatgccaatgcgttaatgctacaaaatcaggattcgatacattttgttcttttaacatttctaaaaataattgtgcatgttcttctgaatttcctgcatcaatcattaacgttttttcttgtccaacgaccattcctaagataggtctatctgtttcagaaacaggtgtcatataccaaaatgagtttcctatttttttaatttgttgcataaccaattccccttttcattttctcacttaaaattaatatataaattataacgaatcactacttttttctctataatcaaacacaattacttggactaatctaactttccttttcgtaagctaaaaataagggaatagaatcggagtgtgatactatggaacgtttatggattccaatgattgtaacatttttttcgttcggtggattactattaggaggtgctgttggagtagcaacacgccaacttattgaagaaaagatgcatcgtttatacgcattatgtggtggtattttacttgggcttttatcccttgaaattattcctgaaacattttcaagctacgaaatggttgggcctatacttggtatagctatcggtattttagttatgagcttattagataactattgtcaccatccaatgatacataaaaaagatcaacaagcatggcaaaccttcctttttctctctttcgctatatttattcataatataccgagtggatttgcgttaggtacagcttttataaatcataatgactctgccattccctttttaatagcaatcgtcgttcaccatattccagaaggattagctttaattattccatttctttttacaaaacataaatatatttcctttttattaacgactttattactttctcttattctcggtactggcacagtttttggcattttgatggaaggaaaagctcttcacctgcaaggcctcattatgggaagtgctatcggttcacttggatatgtcacaattcatgaaatgctttggaaagctaagaaacagctctctttccttacatttctaatgtgggcaactagtggttttttactaataacagtgttcactttattcgctggtcatcattaaagttgctaaagtgaaacttttgttcctcccacactgattcttggattacaaataactagataaatttcttacttgtatatttttcctttttattcaaaacataatgttatctacctattataaggaggaacaattatgtttgggaaaacagcaggtgaagcattagttgatttattaattgattggggagtagagcacatatacggtatgcctggagattccattaattctatcattgaagctttaagaaaaaaacaagataaaattaaatttattcaagttcgccatgaagaagctggtgcattagcagcggctgcctatgcgaaattaacaggaaaacttggcgtttgtatggcaattgcaggacctggtgctattcatttattaaatggtttatatgatgcgaaactcgataaagcccctgttctagcaatttcaggtcaagtagaaaccgatttacttggaacggactttttccaagaagtaaatttagaaagaatgtttgatgatgttgcggtttataaccagcgtattatgtcagcagagcaactacctgccgtagtgaatcaagcaattcgaatggcttatacgaaaaaaggtgtatccgttcttactattccagatgatgttccgaaatttgaagtgaaaaatggtgcccgtgttacaaatacttcttttactttgcctgagttgtttccacaaaaagaagatttagatgcagcgaaactcgcaataaatgaagcgaaaaagcctgtgattttagctggaaaaggaacaaaacatgcgagagaatctttacttgcattggcagaacaaattggtgctccaatcgtacttacattaccagctaaaggaattattcctgatgaacaccctctttgtattggtggattgggattaattggaacgaaaccttcttatgaagcaatgaagcatgcagatactttaattatggtcggtacttcttatccgttcaccggcttcttacctgaaaaagcaaaaacaattcatatcgatacagatcctgcccaaatcgggaaacgttatgcgacagatattggtttagctggtgatgctgataaaacattacgatggttaattgaaaatgttgaagaacacacagaccattccttcttagaacagcaccaagaaatgatgaaaaagtgggaagaaaaattacacgagcaagaagaagactcttccattccaattaaaccacaacgcgttatgcatgctctgcagcaagtagcacatgatgacgcaattctatcagttgatgtcggaaatgtaacagtatggaccgcaagacacttccgtatgacaaaccagcaatttgtcatttctagctggctcgcaacacttggttgcggtttacctggtgctcttgctggaaaaattgcattcccagataaacaagtatttgcagtttgtggtgatggcggatttggaatgacgatgaatgacttcgtaacagctgtaaaatataaattaccaatcgttgtcgtcgtattaaacaataataaaattgcgatgattaaattcgagcaagaagtcatgggtaatatcgaattcgaaacagatttaacgaaccctgattttgcaaaatatgcagaggcgtgtggaggtattggataccgtgttgagaatttagatgaactccttcccgctttcgaaaatgcagtaaaacaaaataaaccgtgtattattgatgtagttgtagatgctaacgaagcaccaatgccagcaaaaatcacatttggtcaagccgctggttatacgaagcatatgataaaagaattatttgaagaaggtaagattgatttacctccactttaaacgaaaaaagatagctgaaaacaatttgtcttcagctatctttttttatttttgtatctctttataaaaagaaaagtcattcatagttggttgtacttaagactcttattttttatcaagagtctttttatttaatttcgcttcagttaatactatgtaatactatgcatctaaaaatctttatacatctcgctaactatttcaattctctaaagttcggatatactttattttatgaatgtatcgcacatccacttatagaatttttctttctcttcaaattgtggataatgagctgatttctcaaaagtaataaattgtttttgatctgcttctatcttatcaaaatatgtttttgctgcatggaatgaagcttagtaggcaatggattttttaaatccttttctaataagacagtttgagaatgtgataatccaacgttataacgaattacgtctaacaagttatattcattacagaaagatttgaaaacatctcgcatacacatttttataaaaacacatagaaaagagcccttgctttcaacacaaggactcttttcataaactatttagctacctcttctttcggcattaccatacctttataaagttgaacagttatccagtaataaatgaaataaatgacaaagaagattcctattggcacccatacttttacaaacgggtcaactaatataaagctgaataagttaagccctactaatacgtgggaaatgccaatgatcgctgggaagataaataaatatgaaatttctttatatatacttttcgttaacatactgcgtctcacaccaatttttcgtaacatttcataacggcgtacgtcgcgagaagcacctgttaatattttgaacataagggaacttgccatcattgctaaaaaggcaattccgaggaaaaatcccataaacattgttccgctcatgaagctgttcataaactgataaattgtcattttcgtaaataagtctaccttttcacctgttgctttttcaatttgttctttttgtctcttgtctatttcgatcaataacggtttatattttttcatatcatctacttttgctaatgttacagtatgttctgttccttgaatccctttataatgctcttcgtctgcaatccttactggttttccgctaaattgattatgcgtaatttgtatctctcttacaactgcgtcttcccaatcctttggcatttgagggaattttgctaattcaggagcctctaaagctgaatatacaggttcagttaaaggttcagtcacacgtttacgaataggctcttttaaagtttttgtatcaaaatggtctgaaacaagtggtggtttcgcagttaagtcgttacgtaaataataaaccgcttctccatctactttatatttgtacttgctttcttcaacaatttccatttcttttaaggcagctttatcttgatcattcggatcatgaattacaacatcatatacacgagaaaagtctgtcataatacctacatttttttggaacgccatacctgccgtcatcgcacctgcgcctaatgcaattaacattgctacagtacctaatactctcgataaactatttactcgaaagcgtagctgtgcatatgtaaaactatttagaccagtttcatttcgttttttattccccttaattttcatcacaaaaaatgggagtaatgaactaaagataaaatatgttccaagtgttgtaacgatggttgctataataaaacctaattcagcataaatttttacattgatcataaaatagtaccctgtacttactagtaatacaccaagtactgtcattataataatgcgagttttacttttcttcacttcatctagtgtttcatcttcacgaattaactctagttcagtttttcgtaacaatcggacactgttcattatgccagtaatgaaaaataatattaagaagaaaatagctgtaactaaaattgctggtgtgtatacagatgcgtaactaccttttgctgaaatttccattccattcattaaaaagttccctgctacacttgcgagtaacatccctactaaaataccgataataatactgacaatacccataccgaatgtttcaataaataataactgtgctacttttttcttttttgcaccaagcatcatgtacataccgagttcttttcttcttaatgtgagcaagaaagagttggcatatataatataaaatacagtaatgaaggataatagtattgcacctacccagaagacgagccttatactactaattagactattatcttttgtaaattcactattcatcgccatcgtttggaacatgtagaaaatactaatactaataacgaggccaataagtaaaaccatataatcttttaacatctttttcatactatgacgtgataatttaaataacatagtttcaccccctacttagactcagcagctgagcccatatgagcgagcacacctaaaatgtcttgatagaaattctctcgagtaccttgacggtttaattctttataaagaagaccatcttgaataaataaaatacgctcacaataacttgcactaaatgcatcgtgtgtaaccatcaaaatacttacattgtgattttcatgtaaatcttgcatcgcttctaataaactttttgcgtttttactatcaagcgcacctgtcggttcatctgctaatacaattgctggattatgtactaaagctcttgccgccgctgttctttgcttttgtcctccagaaacagccgtcggatattttgttaaaatttcggtgatgcctaatttcttcgcaacgtcatttacctttccagtaatctcacttgacggtacgccttgcaaagaaagtggtaaagctatattttcataaattgataagttttctagaagattaaaatcttgaaaaatgaaacctaatttttgagagcgaaaatcagataatgcattgcccttcatagaagtaatatttgtaccagctatcgtcacactaccacctgtcgcttggtcaagtgtacttatcacattaagtaaagtcgtttttccagacccagaaggtcccatgatcccgacaaattctccttctttaatacttaacgatacaccccttaatgcttttgactgattctcatttcttttcccatacgttttttctacactttctacagtaactacatttgttgacatctctttcactccatcccttttgtataaaattaatttctcacatatttcttattattttgtcatgtgaattcttaagaattttttaattattcattcaagaagagttacacctgtaacatgaacctttttcctacttcatattctcatttttctacaactcgttccctcgatttcgcttacatttaccttacatttttgtaagataaaaaagaaaacacactaattgctaatagtgtgttttctttacaatcaatattttctattctttatttcctcttcaatagttgccacaaatacatctagcgcaataacttctgacttctcttccccatatttacgtacatttacagctccgttttccatttccttatcaccaataacaagaacatacggtactttttgcatttgtgcttctcttattttatatcctaatttttcatctcgtgcatcttgttcaacacgaactccagcttgtgctaatttatgtgcaatctcattggcatattgttcatgtactgcatttgaaactggaattactttcacttgaactggtgccacccatgctgggaacgcacctccaaagtgctcaattaatattgctaagaagcgatctaatgaccctaaaactgccctgtgaataacaactggtcttttcttttcattattttcatctatataatttaaatcaaatttctctggcatttggaaatcaagctggattgttccgcactggtggcttctatttaaagcatctttaatatgaaaatcaattttcggcccgtaaaatgcaccgtcaccttcatttagtctatatttataatttagcgattgtaatacattttctaatgccgcttctgcttgctcccataatttatcatcacccattgaatcttctggacgagtagaaagctctacttcatattcgaatccaaaagttttatatacgtaatcaatttgcgccattactgatttaatttcatcttcaatttgttttggagttacaaataaatgtgcatcatcttggcagaaagtacgtactcttaataatccgtttaacgcaccgctaaattcatgacgatgtacttgaccaaattcacacatacgaatcggtaattcacgataagaatgcaatttatttttaaacataagcatgtgccctgggcagttcatcggttttaatgcaaaacttttattatctacttcagagaaatacatattatctttataatgtccccagtgccctgatctctcccatacttcttggttcatcatgaacggagtgcgtacttcttgatacttatactctttttgaatttctcttaaaaatgcttccaattcgttacgaatcatttgtcctttcggtaaataaaacggcattcccggagcctcttcagaaaacataaataactcaagctcactgcctaacttacgatgatttctttttgctgcttcttcaacgaaatgtaaatactcttctaattctttttgagaagagaatgcaacaccatatatgcgctgaagcacttggttattactatcacctcgccaatatgcaccggaaacgtgagttaattgaaatgctttcaaataacctgtagatggtaaatgtggtcctctacataaatctacaaattcaccttgtttatatagtgttacactttccccactaggaattgcttctaaaagttctaatttcaagcggtcgttcatttcttgaaacagtttagctgcttcttctcgagaaacctcaactcgttctatctttatattttcatttatgatctttttcatttctttttcgatttttcgtaaatcttctatgtttacactacttggaagatccatatcataataaaatccattttcaataacaggtcctactccaagatttatatcaccatacaatctttttacagcttgcgctaaaatatgtgccgcggagtgtcttgcaatttctaccccttcatttgaatctatagtaatgatttccacttccgcattttcttcaatatttcggcgtaaatcatataatccatcatttactttccccgcaactgctttctttttcaaactactgctaatggatccagcaatttcttctaaagtaactccatttacaaattctttaacgctaccatctggaaatttaatttcaatcatttgttctttcatttttcatctctccatttcataataaaaagcacactcatccctaaaatagggacgagcgtgcttttacccgtggttccacccagattcccattgtaaacaaacaatggcttcttttacggtaacgtcgtttatacggcactagatacttaatttccccagtgcagctctaaggtggtaagttatttttctgcgttaggaagttctcagctttccttccttctctgtataaccgggtaaaataactcgtgtccttttcttcgcttattatgaaattgaatgcaaaaaagcatattcatccctaaatatagggacgaatatgcttatatccgtggttccacccagattcccatcacaaaaaaacataatggcttcttttgcgataacgtcgcatacacggcactagatacttaatttccctagtgcagctctaaggtggtaagttatttttctgcgttaggaagttctcagctttccttccttctctgtataaccgggtaaaataactcgtgtccttttctttgctttttataaaacatccatttattgttatttaatatatcttattcattttatttttgcaagtgtttaaaaaaattatttatttaatttaaaaaagtgaaaccaaatttttttggtttcacttcacaattttaccaatcttgtggttcgtaatttaagtctgcaaatagacgtcttttctctttcttcgttaaatctctccactgcccaactggtaaattattcaattcaatattcataattctcgtacgttttaacgtgtatacttgataacctaaagcttcacacatacggcgaatttgacgatttagcccttgtgttaaaataatttggaactcatattttgataactgtgtaatctcacaaggaagcgtttttgttcctaaaattttaacacccgctgccattttctctaagaaatcaggtgtaattggcttatctactgaaacgatatattctttctcatgtttgttttcagcacgtaaaatctcattaacaatatcgccatcattcgttaacaaaattaaaccgtcagagtctttatcaagacgtccaatgtgactaattcgtaaaggatgattcactaaatcaataatattaccttttactgatttttcactcgtacatgtaatacctactggtttatttaaagcgatatatacgtgatctcgagcaattcgaagctgctctccatttactcgtacatcatcacctgggttcacttggtcaccaatttttgcaaccttaccgttaataattactcttctctcattaattagtttatccgctccacgtcgagacgcttttccagcttcactaataaatttattgatacgcaaattaggcacatccttttctaaaaaaatttcaagctcacactgcttctaccgtacaatacaaaagggtaagcctcctattataacttaaatatattaacatgaaagggtatataacgtcttctattaattacttgtttataagaaaatatctttattatacattcatttatgcactttttcagcgtttaatatacaagccattcttccttacatacagcttgttttccttttatctcttctatctcttcatgaatattagctaatttatataaacctgggaaaatctcttccacataatgttgatgcgtcttttcatctttccaatacgttaacactatgtaacgatttttattttttaaagacttcccaactactccacctaacattccttttgctttttccattcctttattccaaattgtttcttgcttatgtaaaaaatgattttccttttccatctttacatcacatatagcaactcttacgaatgatccttctgtaacaacgtctttcaaatgcgtatcagttatatcatacaacgtttgaaataattcaatttcacatgaaagaaacgtatcctcttgattactatttaaataaattgtatcgtgagcaccattcataaatgattgatatgcacttctatcttcccataaagtaaatacacatgcctcatcttcataccatccaccaaattgtccatgaaacccatctaggtgccgtatatcacgccattttccttgcgcatttgaaaacaattcctttttctcttcttccaccttacagtagattgtttttagtagcatttttaattccccctttagcatataatttatcttcttctcacaataattagttcacataatatttttataatcaccctaatactctttatagacatatagaactaatcatatttatcactacatctatcgaatttaatttcaaatgattcagaataaaaaaagatgtaactcttaatgaattacatctttagctaatctcccttattcatctttttctcaaataaataatacgtaatgtctcctggataatgtactactgttaccttccgctccccttttttaaaactaacagtatgcccgttttcccctaagttctcccatccactcgcctttgtaatcggcattacacttatatattgatagtcctcttccttatcatcgttaatatgaattgctgacattggtactggaaaacctttaattttagattctttattcataaatatgaatgcaattacaccaactaataacatagccattgaaatacttgaaactagttttcttctattcattttcactaaaaaccctcttttctcacatataactttcatcattttactaactttaattatttatgtatagagaagaaataattttaattatttctaacctattttctctacttaaaacaacattattattatatattataattataagtttttaaattttggaggcgttacatattgcagaaattactttttactaaatggacagttgttatttctattttcatcatttttggtacaattttctacgttactaatgttaaaaataaccacgaaaaagcaactgtagaaacagcggagacaaaaactttcaaaactaaattacaacctaaaattaatgaattgactactcattataatgacatcatcgaaaaagattggttacctgcctgggaagagattaacacgaatggagattcagtagatcgaaataaactattagttacaatgagtgctgtttccaagcagtacgaaacaattatgaacgaaatagacacgcttaaaattgaagaaaacataacagatatagatatacaaaaacaactacttcagttcacaactcagtttaaatccgcatcaaatttcatgaaaaatgcagcaaatttaattatagacggagcaaataactctactccaaccgatgaaactattgaaaaaacaaaacaagctttaggacttgcggatcaacatattgtcatcgctttatctactttaaatgaagttgaagataaattaggacttacaaaaaaataaaactatttactattttaaaataaaaaatgattgcaattcacaatttgtatgtctataatatttttattgatttacaatcaatgtgtttataaattttataattcggatgaaccattcaggagaaggtctattgatctaccgacggggcaaaaagttgttataccagctttgaaactctcaggtcttggttacaagtagaactgcatggggacgaatctctggagagactccctctcgctttcatagagcgcggaggaaaacgagcaccgaaggagcaaatccgctactatagcggataatctctcaggtaaaaggacagagacaagcgaaagaaaatgccgatttgtatcggtttatttttctatcccttgtttctccagagaccatttcatttacttgaagtggtttttattttttctaaataaaggagaataaagatggagacagtaagtaaagtattagaacaaatgaatcaatacgtgtggggattaccaactttgttgctactcgttggaacaggtatcattctcacagtgcgtttaaaaggtttacagtttagtaaactattatacgctcacaaactagcatttaaaaaatcagaagatacctcttcttctggagatattagtcacttccaagcacttatgacagctatggccgcaacgattggtatgggaaatatagccggtgttgcaacagcggttacaattggtggtcctggtgcaatattttggatgtggattaccgctttattcggtatggcaacaaagtatgccgaggcaatacttgcagtaaaataccgtgttagtaatgaaaatggtgaatattcaggtggaccaatgtattatttagagcgtggtttaggtaagaaatggctggcagtattattcgctatattcggctcaactgcttctttcggtattggtaatatggtgcaatctaactcagttgcagaggcaatgcgaattaatttctctttccctcctgctttaactggtatagtaatgtcatttttaatcgcaattgttattttaggcggtgtaaaaaaaattgggaaagtgacgggatatgtcgttcctattaaagctttcttttatataattgctggtcttataattattttctatcactacgaccaaattccagaagcattttcacttattttttttggtgcatttaatggtacagcagctgctggtggttttattggggcaacagttgcatcagctattcaaatcggaatggcgcgtggtgtatttgcgaacgaagctggtttagggagtgcccctattgccgcggcggcggcaaaaactgattcgcctgcaaagcaagctttagtttcaatgactggtacttttctagatacgtttattgtatgtacaattacaggactagtattaattactacaggtgcttggagatctggtaaaactggcgttgaagctacaacacttgcattccaatctgtatttggtactgctggtagtatgattctcggtatcgcaattattttatttgcctactctactattttaggctggtcgtattatggagaaaaatgtgtagcttatttattcggagaaagtgcagttaaatattataaagcaatctttattgttatgattgcaattggtgctaatttaaagctaggaatcgtatggacatttgctgatattgcaaatggacttatggcaattccaaacttgattggtctaattggattaagtagtattgttgttgctgaaacgaatcgctttttacaagcagagaaattgaaagaaaataataaaaaacaggcaagttaatctatgaaaaaaggaatgactcatacatgatgagcgttccttttttcatcccctcttttacttaattactatcattaaaaatatatttatatcaatatttactcctttttattccttcaaaagtttttcacataaatgtcataaatcgtatggtttaactatatagttgaaaaggaatgcgacattaaggtgtcactgaaaaactcatccaagaaaagggaggaaaaatcttttgaaaaacaaaatcatcgttttcctatctgttttgtcatttattattggtggtttcttctttaacacgaatacttcaagcgctgaaacatcatctactgattacgttcctaaccaattaatcgttaagttcaaacaaaatgcatctttaagtaatgtgcaatcttttcataaatctgtcggagctaatgtcttatctaaagatgataagttaggttttgaagtcgtacaattttcaaaaggtactgtaaaagaaaaaataaagagctataaaaataatccagatgtggaatatgcagaaccgaattattacgttcacgccttttggactccaaacgacccatattttaataatcaatacgggttacaaaagattcaagctccacaagcttgggatagccaacgaagtgatcctggtgtaaaagtagctattattgatacaggagttcaaggctcacaccctgatctggcttcgaaagtaatttacgggcatgattatgttgataacgacaatacatctgatgatggtaatggtcatggtacacattgcgctggaattactggagcacttacgaataacagcgtcggaattgctggtgttgccccacaaacttcaatttatgctgtccgcgtattagataatcaaggaagtggtactcttgatgctgtagcgcaaggtattcgagaagctgctgattcgggtgcaaaagtaattagtttaagtttaggagctccaaatggtggtactgcattacaacaagccgttcaatatgcatggaataaaggctctgttatagttgcagctgctggaaatgctggaaatacaaaagctaattaccctgcttattacagcgaagtaattgcagttgcttctacagatcaatcagatagaaaatcttcattctctacttatggtagctgggtagatgttgcagcaccaggttcaaatatatattcaacatataaaggaagcacgtatcaatcattaagtggtacatctatggcaacacctcatgttgcaggagtcgcagctcttttagcaaatcaaggatatagcaatacacaaatccgccaaattattgagtctactactgataaaattagtggtacaggtacgtactggaaaaacggtagagtcaatgcatataaggctgtacaatacgctaagcaattacaagaaaataaagcttcttaagaaaactttaatcagtcgatctaccatgaatgcagaataaaatagaaggagagacttctataattaaagcctctccttcttacaaactatattactctccctgctttttaaccatatgtaaatacagtacaaaatccatcattgtcgatgaatgaccaagttgacgaatcatcgctgttatatttcctctatgatatgtaccatgatttacgacatgttgcactaattctaaaatcgaagtttctaatttccctacgtatggattctcaataacaaatacagcattcacatcttgtattgtaattaaaaactctttatattgatttgccatgttttcaaacattttttctaattcatgtaacgatttagtttcaatttgttttcgtaaatcttctcggtcttgtattgcttcattcatacttttaccatgcaatatatgtaaccacacttgatctgtaatataaatatgcacaaaagtatccttaatggatgggaatacactctgtatctgctcattaaaaattgtctcatagtttggtaactcttttaatcgattgaataatctagtattagcccaagcatgataatcacactgttttaatatatactctttcaatttatattacctccttattgtatgaaacgaatggtttgtttcttcatttctgattctctatcagcctttgcaatccctttttctttcatttcatgcttatttatcgttttatattttacatacgtataaaattccgtttgaaatggaaatggtgtaatccgaattgtttcctcgtccacccattgagcttgaataagtttctcctctttactattaaacatttctgttccttcaaaaccatctttaaataagtcaatttcatctttctttttgacaccaggcttattcatacatacgtataaagaaagttcatcacaaaactttaataatctataatgcttatcgaacatcgcaaactgttcctttgttaacgttttcaaaattcttttttgtcgttctaattcatgtttataaaatgacatcatctcttcatcttcctcgtttagtgggaatgataaaaaatgtttactacaaagcaatgccccgtatggattagaattttcaatttcattcaatccaatcgtataaaaagcaaaacgtaatgggcttggacaatccataaatgtatatggaatatttttagcatcattcaaaattggtactttatcaagctctatccatcctctgtcatgctcatatattgcatcaactgtttcttttaaatatgttttatcttcaaaaaagtcttcttttatatgctttgcaatctctccagctaaaaaaccatgatcatgttgacgaattaaaatactttccttctcatttttttcacgaaaaatcattcgtatactccccctcatcctcatattaaagctttttatatgcatcgattcttaattaatccctaaataatagaagggattcagtctcttgcaacgaaattaacataattatatagtattctttctaatcatagtgatagctttatctttactatctattatactaaaacattcattccaaaaatttttttatgaggtgaaaacatgaacaaaacagaattaattaaaaacgtagctcaatcagctgatatttctcaaaaggacgcttctgcagctgtacaatccgtatttgacacaattgctaatgcattacaatctggagataaagttcaactaatcgggtttggaacttttgaagtacgcgaaagatctgctcgtacaggacgtaatccgcaaactggcgaagaaattcaaatcgccgctggtaaagttcctgcatttaaagcaggtaaagaattaaaagaagctgttaaataaaaacaagaaaccagccattttataggctggtttcttgtttttatttaagtaattgctttatattctctgcatgatacacttcacaaatataaaatacacatttgcagttacttacaatttgatactttctagttggatacacattcgctgtaacagaacatccatcaaacaattcaataatatttccagatggctgatatccttcatataatacgtttcttcttacttccatcttttctataagcttttcaacaggaatatttccactctctaattcactctttattgcgtccggtaaaaacgaagtgtctgcaaaaattagattttcagataacacctttcctttataactaacattagatacacggtaaagaaatgttccatctttatcaaaaaaattctttgcttctttcggaatgtactgtctaccaagtgcctcttgttcaagaacatcaaactgaactgtatcatttaaaagcttttctaaagcatgaatggatgatgtatctccagaaaataaaatatttttaattgcttgtacattataagtgaattcattctttctattttccgctactaacatgaggaacacctcttctgtaatttttttatttaagatttaaaagtgctgccgcgtctaattgcgtaatttcagtcacttccttactgaatattgcaacagaagccctataatctaaactaggccttacatcttccatcattgtattacttgctaactcttgtctatccttaaaaaccaacaagtttggaggatcatttggagctgatactgtaatatgtactggtggaatcattagtccttcacctgtcgctttcagcaccgcttcttttcgagtccaatatgttaaaaaaccttctattttctgttcatttggcagtttcataacttgcgctatttcaatgtctgttaatacaccttctgccattttcataacatctatacttggattcatttgttctacatctatgccaacaggtgcagattttgtaaatgcaacgacaacccactcacctgaatgcgaaacggataattgcggcataccttctggtaattgtggtcttccatgctgcaatttacatactgagcacattcgatcaattggtacttggactggtgacatagaaagtatcttgccgagaactaatctacttattacgcaacctattataaaacgagctcgatctgccgaatgatgatacgaatttgctttctctcgctctatatcatttagtaaattgtaatgccatgattgtaaatccgaaattcttgcccaccatatttgacaatcattctcattcaaagttggaatagaatctacaactttactttctatcatgtaaactctcctttattcaacgaatatcaattttcataaaaaagcatacgtatattgttattcattgacaagtactttctctttttctgatacagataatgttttttctttcttctttgacattacctctttatcggaaatacgtaaagaaaatagtagtgctatgagcaaaaatattgctgacccaattaatgctgcttgatatggtaaaaaatcggattgaacgttattacctccaaaaacagctagtatactagctaaaaacgctactcctattgctgaacctagtcgattttgcacattgaatatagtagtcgctctccccatagaaggcggcgtgatattgttaaaggcagaaaattgaaccgcaccgacagattgacctaagaaaataccgataccaaacaataatgcccggatttgccacggattcgtatcgtgatttacaaaactcaataaaacaaatataaccgccgtacatattaatccaatagaaattacctttcgagctcctaatttcttatatgaccatggtacaatttgtgaagaaatcattaatccaatcgcctctggaaatgtcgtaagtcctgattccagtgcagaaactcctatcacattttgatacataagaggaaaaacaaataacattcctaataaaccagctgatgaaaataatgatataatgctcatctttctaaagactggttcttttaataagcgtaaatctaacatcggttgctttactttcagttctacaattataaacaatgtaatgaatacaaccccagctatcccagtactcataatttctggagaaatccacccttttgatggtccctgactgagtgcatatatgagcatcgcaaatcctggtgctgataaaataaagccgagcgaatcaaagcgaccagctgatttttcaacatgttctgctaaaaatagaagtccaaatagcaatgcaacgattccaaacggtagattaatataaaatgcccaacgccaagacatttgatctacaaagaaaccaccgatgataggaccaattgctggtgctacagcaattggaagtataatgaaccgggaaatcttcggtctttcctcgggtgaaaatgttcgaaataacatcgccattccaaccggtgttaaaagccctccgccagcaccttgaataatacggaaaatattcaatgaagtaatatcgttagccattccgcataaagcagatgcaattgtaaatacgaaaagagcaattaaaaatactcttttcgtaccaaaacgatctcctaaccaaccagaaatcggaaggaaaacagctaaactaactaaatacccaacattcaccgtccccattgcagatggaggtacttgtagttctctacttatcgtttgcagtgctacatttacaatcgttgcgtccatcgcagccataaacatcgcagttatataaacgatacttacaactacttttggatttagtttttctttcattatcgttttcctactaatgttttttcgcgaacttgattaccttgtggattcaaatctttccagttatattcaacatattctaagcaactctgcctactagcttcttcatatacgacattccagccaataggtacatcgagaaaagcaggccagagagaatactggccctcctcatttattaatactttatatgtgtaattatcattttcaaatggattcgtcatactctacttacccctttcttattctgcaaatatttcgctaatacttgtccaatttccgtaagtggacctggctgacatagatctttatgtctacaatcaacatcgtgctgcacaatttgcccatctaaataatttaaccacgtatttggagaaataggatcaaaccagtctggtataacagtagatctaaagaataagatatctccgttataaactttcggtacatatttccctaacaaccctactgaatttacatatgtttctttcaagttcaatatagtctcttcttcaagacttgctaatgcacttccatctttacgaaggatttcaactgcactttccattgtaagtggtttaccatccatgttatctgggtcatatccgcctaaagcaagtaatgcgattaacgcttcctcttcagtaggcgcttccgtattcggtaagaagtgtccaggataagaatcaagcataacgagtaattctacttcttccccttcattttgtaattgcgctgccattgcatgcacaacatttcctccaagcgaccaacctaataaacgatatggtccatgaggctgtacttcacgaacgtgtttcaagtaatccgccgccatctcctctaaactttttggaagttcttcatttttagcgataccacgtgcttgtacaccatagattggataatctgttcctaaagatttcataagtcctgcatagcaccaacttaatccacctgctggatgtacacaaaatagtggtaattgatccccgcttgctcgtaatggaagcaacacatcaagtgcactttgaccattccccatctcaagtctttcagctaaccctgcaacagtcggtgctgcaaataaagtgccaatatttagttccactccaagcgcctctttcatgcggctcataagctgcactgcaaggagtgaatggccaccaagatcaaagaatccgtcatcaattccaatttgaggtacacttagcacttctgtaaacaagtcacataacatttcttcttgcggtgttcttggaccacgactagaagatgatgcgataaattctggagctggcaatacctttctatctaatttaccgtttggagttaaaggtaactcatttactactacaaaagcgtatggaaccatataatctggtaaactaccactagcaaactgacgcatttcattcgtatcaatcgcttcattatttgatgcaacgatataagaaactaaccgtttatcccctggttgatcttcccgtacaataacggctacttgctcaactttagggtgcttcattatgactgcttctatttctcctaattcaattcggaacccacgaattttgatttgatgatctgcacgtcctatataatctagcgtcccatctttacgccagcgagctaagtctcctgtacgatacattcttgtacctggcttgccaaatggatctgcgataaagcgttcagccgttaatcctgctcttcctaaatatccacgcgcaagccctgcacctgcaacatacatttctccaactactccaggtggcactggttgtaaatagttgtctaacacatacactttaaggtcaggtatactgcacccaattaaactatttgctcgtaaagagacgatagtttcatctaattcaatataactaacatgtactgtcgtctccgtaataccgtacatattaataagctttggtgcgttatgaggatgtcgactataccaatcttctaagcgacttagctcaagtgcttctcctccaaaaacaacatatcgtaaagataatttttggccaatctcttcattttcacgatctgcttgcatcaattgatagaacgctgatggagtttggtttaaaaccgtaaccttttctttaacaagaagctgtaaaaattctttcggtgagcgacttacagtatgtggcactacaactaaacgccctccgtataataaaggtccccaaatttcccaaacagagaaatcaaaagcgtatgaatggaacatcgtccaaacatcgtttccgtcaaactggaaccaatgatcagttgctcctaaaagtcttactacattttgatgaggtatcataacgcctttcggtctacccgttgagcctgacgtataaataacgtaagcaatatgtgatggagataatggcttaatgcgttctacttcatcaatattttcttcactatatttctcaacttctgctattacttttacatcatcaactaaaacttttagtgcctcatcacattcaaattccacttctgaattcgttaaaacacatgttggtttcgcatcgtgtagcataaatgaaatgcggtctgctgggtaatctggatctaacggaaggtatccagcaccagctttaagaacagctaataagcttacaaccatgtttaatgatcttggcatcgctaaagcaacgagttgatcaggaccaatcccttttgctattaggaatcgagctattttatttgcttttctatttaactctttataagttaatttcttatcttcaaagacaacagcaatagaatttggatttatatgaacctgcttttcaaacaattgtggcaatgtcatttctggtgcaatttgaaaaccaccattccacttttctaacactgtatttttctctgctacagttaatatttctaatctgccaattgattgatccggatttgtagctgcatcatctaataacaaaatgaatcgttctattagtttttgaaccgtttcacgtttatataaatcggtactaaactctagtaatccatgtaaaccgttcggagtaccatcaaccccgttactctcactaatttcaaatgttaaatcaaattttgcagaaccgacgctttgaatttcaaggctcgcttctaaacctggtacatgaaacgttgcttctggtgtattttgaaaagctaacataacttgaaacaacgggtggctgtttcgagtacgtactggatttaacacttcaacaagcctttcaaatggaacatcttgattttcataagctgcaagatttacctgcttcactctatttaataattctttaaaacttggatctcctgacgtatttgtacgtaacactaatgtatttacaaataaaccaacaatatctgaaagtacatcatcatttcttccagcaatcggacttccaattggtatatcagtgcctgcacctaatcttgtaaatagtgcactaagccctgcttgcaataccataaacaaactaactccatttttacgtgcaagctctactaacctactatgcataccttcatctatatgaaaatgaattgtttccccgcggtaactcgtctcaattggacgctggaaatctgtaggtaactccatttggtctggtaaacctttaagttcttctttccaaaaatctaattgtgttgaaataagactctctggtgtcgtttcatcacctagcaattgctgttgccaaagtgcataatctgcgtattgaactggtagtgtctccagctgaactctgtcaccttgacatcgcgctttatacgacgctgcaaagtctctcgttaacggctgtaatgaccagccatcacctacaatatgatgtaataaaattaataatacatgttcgttttcactcactgtaaaaagttgtaaacgaactgccggctcaaaatcgaggttaaagctatatcttaccgcctctgaaagtacactttctaattcatctttacatgtattagttataaccatttctagatttaagttttccatatctaaaattctctgataggaactacctaatacgttagggaaaattgttctaagtgtttcatgtttctcaactacatcataaaaagcaccttgtaatgcttcccgattcaatattccattcatacgaatgactagcggaatattataagtaggacttggaccttctaaacaatttaagaaccataacctgcgctgtgcaaatgaaagtggaacttcatttggcctacttgctttctgaatagctggtcttgcactttttgcatcgtttaattgtttcgccagttcggcaacagttggtgattcaaatagtttcccgattcctaattccacacttaacgtttcacgaatccttgccattaaacgagatgcgagaagtgaatgtccacccatttcaaagaaattatcatcaatgctaattcgagaaacaccaagtacttctgcaaataaatcacataatatttcttctttcggatttctagcaactctctcattgtgcattccattaaaatcaggagcaggtaatttctttctgtcaaccttaccatttggcgttaatggtaattcttctagcacaacaaatgccgatggtatcatataattcgctaaactttctgaaacataagaacgaatttctgaaagattaatcggttccttttcttctgcaacgatatacgcaatgatgcgtttatcatttggacgatcttctcgtaccattactaccgcttgttgaatattttcatgtcgttgtaataccgtttcaatttcagctaattcaattcggaatccacgaattttaatttgatgatctgcgcgactaatgtactctaacgcaccatcactacgccatttcacaagatctcctgtacggtacatgcgcttccctgattctccataaggatttgcaataaaccgttcagctgttaactcaggttttcctaaatatccgcttgcaagtccctcccctgcaatatataattccccaataactccaggtggaactggttgtaaccctgcatccaatacatacacttctgtattgcaaattggctttccaataggaggtatacccttttcaccttcatcaatgttcataaaagtagaccaaatcgtcgtttcagttggtccatataaattagttattgagcaacctaattcttttaatttatttgctaaatgcgctggaagagcttcaccaccaactagtatatttagcccttgtagcttctctggataatcagttactaacgcctgccaaagcgtcggtgtagcctgcataatggtcactctttcttcttgtaaaagtgtcgttaatgctgatggctcttgtatgtcttctttttgcgcaattgttaaacttgcaccactaataagaggtaaataaatttctagagcagaaatatcaaacgcaaacgttgtaactgctaataaatgatcattttcatttaatgaaaacttttgttgcatagccattaaaaagttacttaaacctctcataggaacaattacaccttttgggtttcctgttgagcctgaagtatatattgtataggctgggtttaaaagtgatacatcattcttacatgctatattcatacgagaatatgtatgtaacgctagtttcgtttcttcttcatctaatacaatttttttcatatcattttctataactaacttagatgaaacagatgaatatgttatgatacaaactggttttgcatcatttactatataattaattctttctgctgggtattctggatctattggtaaatacgctgcaccagcctttaagactgctagcatactaactaccatttctattgatctagggaatactaaagctacaaattggtttggtcgtattccttcttctactaaataatgtgctagttcattcgctcgttcatttagctctttatacgtaaggtttacaccgtcacaagtaatggctagtttattgggatttttttgcacttgtttttcaaatgatataggcagactgattaactcatcgtcttccttcgtttcattccattccaataaaactttatgattttcttcaggcagagtaatgtttatttttccaatcgactcgtttttctcataattatttactactaattcaaatagactcataaatctttctttatgcaatgctagctccgcgccattatatacttcaggatttgcatcaaaatgaatcattagctcattttgatcaaaacgtttatatacatttattgataaatcatcgacaggtcctgctgataaattatgcgtaataccacgattcccagcaaaatttagcccgtaatcaaaaggtataacattcactaacggtccaaacaacctttgattttcacctagtaactttaagtctcttcttaattcctcatgacggtatttataatggcgacgtacatctcggatttctttagaaacttgctgcaataattccgcaagagttatatttggagttactgtaatacgaagtggcactaaattcattaccatacttggtgtatgaatagataccgaacctagacgtcccatcatcggtaaacctaaaacaatatcatttgcacctgttaacttatgcatataaatacttgttacagcgacaatgaattccggccaacttgttaacgaaatattgatatcttctaataaagttttcgtgctagaactagataaataagctgtttctcgtgaaaatccatttgatgttctcggtgctcgctctgccaagcttacaacttctggttcatccgcaaatttttctaaccaaaaagtacgatcttcctgaaattttttagactcacgatactcaatatcttcttgcacgacttttgtaagagaaccaaacggcttttcattcttgtttgtttcttctataagtgatgtatactcattcgccactttttggctaagaagtgaaaatccatagccatccatcacaatgtgatggatgcgctgataccaaaagaaacgattattttcaacttgaataagtgcttcagtaaataatgtatcttttttcaaatcgactggcatagataaatcatttttcatccatactttagcagcttcttcaggattttcttctttacgaacgtcaataaaatgcatatgaaactgtgattcttcaataacttgccatgcgccaatttcatcctcctcgaagcgaacatgaagtgcttctgcttccattacaactttacgtacagctaattcgaaaatttcttgatgaatatttccgtttatttctacatattccccagtattgtaaattggattaagcggatctaattgttgcgcaaaccacataccagactgcgcagatgataacgaatgacgaatcttttgactgttaggcattctttactacccctttattatgtagtctatttgttacagcacctgtgctgtttgtgaagatagtaaactgtaccaacctgcaacagttggacgttctgctaaatgtgcaaaagtgatttctttcccttcacgacgccacttctctactaaactcataattctgaccgaatcaagccctctatttaataagtcctcatcaatatcaatactctctactggctcacgaagtagttgtgcaactagttcatgcacttcctgtatagtgattccttcactctcatcatcttttacactttgtaaatcgtttaacagtaggtttgttgatgtcgttactgcacatctattagatgcatacttcaatgcttgtttatgatgctctagtgaaaaatcagcaactgcatctgctacaaagaacggctctataccatccataaatgcttcacaagctgttaaaagacagccaatatgcgcataaataccgcaaataatgagttgatcttttccttgttcatttaaaatttctaatagatttgtctttttaaatgcactatatctccattttgtgaggaatatatcatcctcatcaggagtaagttcatcaacaattttctttttatctggtccagcaggtataccgtcaccccaaaagtcttgtaataaacctcgttgttctaacgtttgcccaccaggttgtgctgtataaacaactggtataccaagttccttacatttttctcttatcatttttatatttgaaataagttctacttttggtgattctttatcgctatatgcatcaagaaaatattcttgcatgtcatgaattaaaagtactgcacgtttcggatctggcgtccaattcactttattttttggtagttctgattcaattggcattttatatactgaaatagatgggatagccatctaatcacttccttccggtttttattattgttttactgtaataagcttttcagcaatgactttacgtagttcttttttgctgacttttccgactcctgtttgcgggaatgcttcaataaattcaattcgatctggaattttataagccgctataccacgttctcttaaaaacatttttaattcacttactgctggaacttgtccgcgagctataacaaaagcacaggtgcgttcacctaaataatcgtcaggcatagatacaattgctacgtcatggaccgcatcgtgtgctaatagatgattttcaacttcttccgcagcaactttctcaccaccgcggttaatttgatctttatctcttccttctacaatgatgtatccttgttcatttacttttacaagatcacctgtgcgataaaatccatcctttgtaaatgatcgtgcattatgctcttcggctttatagtaaccacgaattgtatatggacctcttgttaataaactacctacttcgccaggttgtacatcgttgtcattttcatcaacaactcgtacttcatcgagtgcagacattggtctaccttgtgtataaataataaattcttccggatcatctaatcttgtatagttcactaatccttccgccataccgaacacttgctgtaacgtacatccaaatgtaggacgtatacgttttgcaacctcagcgctaaacttagcaccacctacttgaataatctctaggcttgataaatcggcattacgagaagatgcagcatcaagccaaatcattgctaatggcggaacgagcgctgtaattgtaactttttctttttcgataagagcaaaggcctcatctggactaccaccagttgccaataccacttttccacccgcatagaaagttccaaatgtccctggagaactcattgggtaattgtgtgctactggaagaactgccatatagacgctttctgcattcaaattacaaatttcagcgctaacacgtaaactataaatatagtcatcatgtgttctaggaattaatttagaaagacctgttgtgcctcctgataattggagaaatgcaacatcacttggctgaacttctggtaatgagacgggatccatatacagatcatttatgttcacaaactcttcttcttctcccactacaattacatgttgtaaagttggcactttctctttcacttctcttgctaattttcgataatcaaaaccgagagccttatctgaaataacgtaagcgctcgcctcgccaaactcacaaaaataactaatttcactgcttcgatgtgaaggtagtgcaaagacaggaagcgctccaattcgaaatagtgcaaaacatatttcgaaaaactcgataatgttaggtaactggattacaactctgtcctctttctttattcctaaattcagtaaacctgctgctaaacgatctacctttttattaagttcactatatgttatatgcttcttaccacttacaaccgcgattcgatctccatatttctcagcccgctctcttaacactcctccaaatgtttcaccaagccaacatcctgcttctcggtaacgatcggcaaattcttttggccattctgtataacctactagcattctttcttccccctatttttcattaagtgaactatctcttaaccctaaagcttttagcattgtttggaacttagctgatgtttctgctaactcatcttctggttttgactcagcaacaactccagctcctgcatataaacgaagtgtattttcttgtacttcagcacaacgaattgtaacaatccattctccatctccatttaaatcgctccatcctagcattcctgtaaagaactcgcggtcaaatggctcaatatgctgtatagcttctcttgctttttccatcggagttccgcaaactgctggcgtaggatgaagggcaattgctaattgtaaagaagaagtatttggatccttaagttcacctttcacttctgtagacaaatgccacatcgcttcactatgaataactgatggcttttctggaacatgtaatgtatgacaatacggacgaagtgcagcggcaaccgcttcaactactaccgcatgttcatgtaaatcttttggcgaagaaagtaattcctctgctcttcttttatcttctactgggtcctcactacgtggccttgaaccagctaacgggttagaaataacttgcataccattacgtgaaacaagtaattcagggcttgctccaattagcgtcttactgttctctttttcatctttcggtaaatttacagaaaatgtataaccatgcttattatgctctgctaattctcgcagaagtttttgcttatcaatcttttcggaagatttaacatctaacgatctggatagaacgattttctttaaatcaccgtcctgtattttttcaattccttgcttcacaccattcatatatacttcagggtctggcactggtgtcatttcaaatgttacattctcatttgtttcaagctgatttgttgtatccaattgtaaacgctcagaaattctgctatattctggtacgatgagttggacttcttttctacgatcaaatggcaaagcacccacaacgataggatttggatttccagcttgtttcgcattacttaatttcgcttgaacaagctctgggaaactttcaatttcacgatgctttactgtagtaaactctccttctgctaatatcgttcgagttggtgaagcgaaaaagaatgaagattcagtcttataatcttctaaaagtttttctgacaattcctttacagctatatgttcattcataatataataacctcctgaatttttattaaactcctaacgtagcaccgccatcaacacataaattgtgcattgtaatatgacttgctctatctgaggctaaaaataacactgcttcagcaacttctgaaggttgtgcaattttttgtaatggaattccgagtctatatgtattttgagaaccagcaattatatttttagctccattctcatcagcccatagtaatctttgcatctcagtttcagtagaacctggagaaactaagttgcagcgtatattgtatgccgcaagctctagtcctaaacatttcataaacatcgtcgttgcggcctttgacgcagcatacgcagccatctccattcttggcgtatttgccgcatttgaaccgactgtaacaattgcccccgattttcttaacatcatatttttacttaccgctcgggacatattgaaaacccctgtcgtatttacagagaatgttttattccaatcttcatcacttaacgaatgaattggtcccatacgtaaaacccctgcaacatttattaaaatatctattggcgctatttcatttgcaatatgatttaccatgtcttcagcagcggcgctatcactcacatctaaacgaaacgttttcatacgtgtattgtttaattcattttgatttaagagtacatttaacccctcttcattttgatcaaccgcaataactgtggctcctctttctaaaaacattttggcaacgacactgcctatgccttgtgctgcacctgttactaaaactgttttcccatcaaattcccctaagttcattttctctatcctttcacataaacattaatttcattaagtaacaccgatgatattgattttcattatcagttgtgttgtaaaaaataatacacttactaaactaattggtcaagtgcgcattactttaaaatccattttattgataatgtttttcatttaccatcttacaccgaaatgataatgtttctcaataaacttgtcaatctttttttatttttcagataaaccattttaatgcttcttaataaaatcatatgtaaacgcattaaaagtacttatattataaataaaattcaaagtcctctttttaaaattgaagaaactaaactagagatacgttcatttacaatgctttatgaaaaactcaagtatatattttctcaatatttttctgaaaatatatcttacaaatactaatgaatgtcttttttgtcatttaagatttaatatatatttcgaatacgatgtatcaatttattgtatttcaatataatccaaataggcatttcactcacttttacatctatgaaaatcataaaagtaatttaaccttgttaaaataactcataaaaaaagcatcctaattaatagaataggatgctttttcgtaatcatattgttatagaagatttatatacttatgctacgctgcgatactcttcttctttttcttttttctgcttaggtgcttgaattaaaattgcgataatgaatgacacgacacataatacacctattaccatgaacgttggtttgaatccacctagaagtgcaccgataaaggaacctgcaagcgccccaaatccaaatccttgatacacaattccgtagttcttactatggtttttcataccgaagaaatcaccaacaatagctgggaaaatagtgatatttccaccaaagcaaaacgctacacttgctacacatacgaagtaaataccataatttaaatctacaaaacttagaactaagactgaactcgccataacaacaaaagtaccagtaacgatttttaaacgcccaattttatccgataacggtcctaaaatgatacgacctaacgtattgaagattgcaaccatagccaccgcattagctgctgttgctgcgctaagtcctacaagttgaacaccaatgtcttttaccataccaattaagtataagccactcatacatgatgtaaataacatgataaataataagtatacttgttttgtgcctaacatttctttcgttgtgtattcctcagtttttgtttcatgaactgctccttgatctgcagcttgatggattaaacaagcaccaattacaatcatagctgtaacaattaaaccccagtatataaatgcttgggatacaccaactgattcaatcaactgtgcgttaacgtatttaaagattaagctacctgaaccatatgcagagacagaaataccagcaattaaacctttacgctctggaaaccactttattaaatttgatagtgaagtgatatatgctgtaccatctgcataacctacaacaactcccgctagtacataaagtaatattagtgaggatgcttgtgaactaagtattaatcctagtcctaatgctaatccagctatcataataagtttacgaagtccccatttttcttgcaatttactcgcaaataaagttgaaaatgctaaagaaagactagtaattgagaaagttatcgcaacagcgttaagactccaaccatatttactaactaaaggctgattgaataaactccatgtatatatcgtcccaagccccatttgtactataactgtgccaaggacaacaagccatggattaacagttgattttttcatacctttccgcctcctctttctatttcaatgctattcgctaaatttactttttttatgttcattttggtcacctcttttgatttgacaccttcattgtataagatgtttttgtttatgtaagcacttacaagatagagcgtcaaaaacatggaatcagttacaaaaaacgaaggatgaaatacaaaaaactactgattaaatacaatagaaaaattttttatacttcaatccaccttattttttataaaatcacaaatttttttccaataaataaaactaaatattcactaatatatctatccgtggtttaatatatataataaaaaaatatttctgtctttaatgaggaggtactatgaaagcaaacgtaggggatactatactttttcaacgaaataatttaaagattacaggatctgtattaaaactttatactgaatcggtcttagttgaaattacaaatgtaagcggtggtacttttgaatttgatcgaacaattgtaaatcataaaaactataaagttttaaatacaaatacataaaacaacacaaaatagcccctgctcaacagcaggggctattttatataaaaatatttcactagtttatataccctaaaacattaacaatcttactcgcttttaaattgttaatatgataataaatttctaaacctcttctctctgctcgtaacactttacccttcatttttgataaatgttgtgaaacagtagattgcggaatattcagtaactctgttaattgtgttacattacaagtttttctcgtacttaattcatttacaatttgcagtcggattggatgcgccataatttttaaaatatctacatcttcttctgaaactaaagtttttctcatttcactcgtatatgttgtcataagacattccccttttatatgaattccatattcataagatctatttccaaattttttaaaacccttgattaaaactttcatatagaaataaaaggattttaaatttttgaaaacagaacttacattcactttatttatttatttggtacatatacataatacaatgttaatatgtgctctatgtgaagttcacataaatttatgatgaagatttacttagccactcgcatcctactcatctaattacccactgcataaaatcatcagttattttaacacattttaggcgtttgtatatactatttataaaacaacttttataaaggggggattcatatgcctacagcgttacaagaagaagtcgaagaagcacgggaaacatatgtcagtcgtatcatcttagttggaggatccgctttatttttagtaggcggggttatctcagcaatttcagcctttaaaacttataatcgtttggagaatacgccgccttctacagataattcatagatattttataaaataaaacgtcgcctccaatatgaagagacgacgttttattattcatacatatgacactaaaagtatcggtagattccctactccattttctaagcttacttcaccacaaacctagtctgactacacccatccttttgcttcgttacttctaatacagctggcattgcgtttttcagctcttgaacgtgtgagatgacaccgataaatcggcctgatttttgtaagtcaattaaggcatctactgctttcgttaatgattcttcatctaatgaaccgaacccttcatcgatgaacatcgtttcgatagtaataccaccttcatatgcttgaatgacatctgccattcctagcgctaggcaaagtgatgcgttaaatttctctccaccggatagtgtttttacatcgcgtgtttggccagtgtatgcatcgtacacatctaaacctaatccactttgacggtttcttttttcaactcgctcacttcgttttaaataaaattgtccatttgataatttacgtagtcgttcgtttgcgatttgaacaatttgttctaaatactcaattaagatgtaacgttcaaatgatatacgactttcgttatcacctttcattacttcatataaatcaacaagttcttggaaggctttttcttcctcgtgaatttgttcgtcaatacgtctaatgttttcatgtaaatcagaaatatatgttaccgcattttgcgcacgttgacgtttttctttaattatatcaagattaatttctagatcttttatgtgttcacctaaagatgtaatatccatatactctttatcttttaattctgcgtttaactcttcaatttgttttgcaagtacttcaagcgatgaataataaccttgaatttctttttgtaacatctccatctcggcatcgcttaatttggcttctttatacgtgaattgatctgtaaacccactttgttctagctctttcataaagcgtgcaaaagtctcttctttctttaattttgcactttcaaattgattagaagcacctttttgttcagcttgaatacgtatattttcattttgccaatgctgatacgcttcctgcactttcttccattcgtcctccattaacctaagttcctgcatagcttgattaaactgcgcttcccaagcttgtactgtttgtaagctttctggaatatttcgtttatcatgttcatatgacgtacgaagttgcatacactccatttctgtacggtgctgcattgtttccacttctcgtttttgtttctgaagttcttctattttttcttctacgcttttcatgttcgcagcaatctgcttacgtgtttcttcacttgcttttaacgtattaacgtctgctgctaattgttttcctttttgaacaagtgcactatatgtttcaactaatttttcggagttgtagccgcgcttcacaacttcttctatcacttgttcatattgtagttgatagaaattccatttctcctctacttgcacatgtaatttttcagcaatgttcttcttatctcttaaatcgtttaactctttttcatcgatcgcattactttgctctgtagctttttgtggatgattcgtactaccacataccggacaagattcaccgtcatgtaaatgaagagctaatataccagcttgttcacttaaccagcggcgctccatgttttcatatgcacgaactgccacttgcattttattatttaccgcttctttttcttgctcgaatttttgtttttcttgccaaacatcatatgcttgttttaaaacttttgcatcttctcgcatattcgttagttcttccactttagctacatattgctcaagtgcttgttctaattgctgcaattcatcacacattctctgtttttggtttgtatgctcttctagttgttgatctaacttttgcatactttcttttaatttccctatttgaatttcggcattttgtaaattcagctttctctcagctaatgattcaatgatcgcttgtaactcttctaatctttgaacaagttttttagcctcttctcgttcagcttctttattctttactacttcatacttctcctgagcaagttcaaagctattcattatctgttcttgtttgacgattatctgttttaacaaactttcagctttctgctcattttccatcgcttcttcataccattgttcaaatggtaataagcgctttgcttgttccgcacgtttaaagaatttttctttcctttcaattgctgcacggttctcttgtaaagtgttatatttctcattcttttgttgtaaatctataaatttctcatttacagattttgctgcatgaaaacgtgtttctgcatcctttaattgcttcgtttgaacatcttgttctacttgtaattgctcaacctctgccttatacacggttgtttcttgttctaacgcttctactacttgatgcgtatttacatgttcttgtgccactaatgtctctaataatgctccatcacggattggtaatttaaaaacattacggaaatagagctctctctctttttgtttttcttgtaagacgtctttccattgttttctcttttgatcaagtaactcacgcattaatttataacgatccgttttaaaaatacgacgtaaaatctcttctttgttttccgtctcagatgttaatagttttcggaattccccttggggtaacataacaatttggctaaattgatgtttacttaacccaattaaatcttccacttttttgtttacgtctgttacatgaaaacgatcgacggctggaacgttttctccatcaataacttcatataattctactgcatgtcctgtaatagtcttattcccttgttttttatgtccaagttgtcgttttatttcatagcgtttcccttttaactgaaaggttaattcaacacttgtataaacattatcatcagcaaattgacttcgaagcatgctcgtatcactacgttcttctccactagcctcaccatataacacataacaaatcgcatcaaaaatcgttgtttttccagctcctgtattcccagaaatagcgaaaatacgatgttctccaagatcttcaaaatcgattatttctttctgtttatatggcccgaatgctgtcataataagctgaatcggtctcatcctcgttcaccttcccattcttgcactgtttgtaatacatctataaataggcgttctttctcttctgataaatctaaccccttcatttctttatagaaagcctttaaaagagataaatcatccgttttatgtcttgaaacagttacttcatttgtatctgtgagttctcgtctttgcatcgctctttcaacgtgcattgcatttggatatacagatcgtattttctccattggctgtaagacagggttttcgtctaataattttacaaatacgtaatcttcacttgctgggtgctgtaataattcatctatttttgcttctactgttcgcattttacgacgtggtgaaagtaaccttttttcaattgctacttcaccagtttcattcagttctacaatgtaataaccttttttatgtttctcttcagaaattgaataggcaagtggtgaacctgaatatcgaatcgtctcattacgtacgaaatgcgcttgatgtaaatgtccaagcgctgtgtaatgaaacttatcaaaataatgactatttacatattcagcaccaccaattgaaagtggtctttctgcatcacttgtattctcctccgcttctcctgaagaagttacaaatgcatgtccaacaaatacatgtctagcttctttatccatcgtttcagagagctcattcataaaaatgcgcatcgcatcatcatgagaacgtacgtcttcatttttcaacacgtgccttactatgcttgggtctgcatacggtattagatggaagtgaacctctccatattcatcatttagtacgacaggttcatacgggaattgaaattgacctgcaatatgtaatccttgttttttcattaaactacttccaaaatggatacgatccggactatcatgattaccagctaccgcaataactggtgtttgtaaatcaataactattttttgcagcacatcatttaataagtctactgcttctgtaggtggaattgctcggtcatataaatcccctgcaataattacagcatctggtttttcttcttcaacagcctgtacaaactgatctaatacaatcttttggtcttcagtcatatacacgccatgaacaagcttacctaaatgccaatccgctgtatgaaataacttcatatttttctactccttttaatttactgattttagtgaaacgagttgatagtttattgtagtttttccgttctcccactctagcttcaatatcgttgcacttccaattctttcttcatttgatttatataaaggcaatatttcttgaactgtaaataagtgataaccatccaatattaattgaaatatattttcttcaatatgtaatcttacttctttttcatttgaaataatttttgtgtgcatctcaaatttcatgatagatacaacccctttttataatctctacattttaatagtatagtggctatgcaagattgacaagtacatacacagcaaagtacacacttttctattgttatatacttcatgtattttatataaaatacggtatgtgaaattttatattttctccaaaataaaaatgcctattatgacacctttatttttgtataaagtctttcattacataatataaaacggtaattaaaacgattgcgacgaaaaatgagaacactgcgacaatgtagccatctttatttaataaaatacagaatgaaatagatattataaaaatcggaaatacgagacgtactttatccttcacttcttctgtcgtatctgtatgatgaaaatactgcgttattcctatcattaaaaaagacaaaataataaccgacaatagtaaaggtcctggcattccgatttctcctttctctatttctaattcagtgtaaaattttttattacaattgtacgatttattttttcttcaaacacacttttagaattgataatgaacatttcacacctatataatagcgcttttatcattataacttcaaataattacacttacagtaatgttgtaatattccccctcagtctctgaaatcctgcaaagataactcgtcaaaatatgcagtgaccaaattaatatttaccgtcaacttttgacaaaatttataaaggacatttcagtacatatcaagaattaagaataagaagatatgtaagggaggatgcattatgactgaacaagttttattttctgttagtgaaaacggcgttgcgacaattactttaaaccgtccaaaagcacttaattctttatcttatgacatgttacaacctatcggacaaaaacttaaagagtgggaacacgatgagcgtattgcacttatcgtgttaaaaggagctggcacaaaaggtttttgtgcaggcggcgacattaaaactctttatgaagcgcgttccaatgaagtggcattgcaacatgcagaacgtttttttgaagaagagtatgaaattgatacatatatttatcaatatacaaaaccgattattgcttgtttagatggaattgtaatgggcggtggtgtcggtcttacaaatggtgcgaagtatcgcattgtaactgagcgtacgaaatgggcaatgccagagatgaatattggcttcttcccagacgtcggagctgcacatttcttaaataaagcgcctggatatacaggacgattcgttgctttaacagcatctattttaaaagcttctgacgtattatttattaatgctgctgattactttatgacatctgattcattaccagagtttcttactgaacttgaaagtgtaaattggcataaagaagatgatgtacatactaatttaaaagaagttattcgtacatttgcaactgctccaaacttagaaagcgagcttgctccttcattagaagtaatcaattcacattttgctttcgatacaatggaagaaatcatccattcattggagaaagatgaaagttcctttgctctaaaaacgaaagaaacactgttatcaaaatcccctatttcactaaaagtaacattaaaacagtttattgatggaaaagataaatccgttgaagaatgtttcgctacggaccttatacttgctaaaaatttcatgagacatgaagatttctttgagggagtacgctccgttgtcgttgataaagatcaaaatccgaattataaatataaacagttaagtgacgtttcagaagaagatgtgaatcgtttctttaacttacttaatgcataaaatgaaattgtcatgaggggatgttttgttcatcccctacctaacttctttgcttcagctaaatcttgtgcggtgaaaatcttactacccgcaaatagcggtataaaatcgaagctatatagtagtgtaattacagctactatatagccttttttatttaattatttttaacaaaatttaattttattaaatccatttttgtgctacactgattttaatcaaatattctaaaaataaaaaggaggggcggctatgatagaaaattatcttcttttcatcattatgtctatttgccttatcattttacctggtccagatacagcaatggctacgaaaaatacattggttgctggtaaagtcggtggagtgaaaacagtgtttggtacatgtattgcactattaattcatactttagctgctgtaattggtctttctgcacttattgtaaagtcagctcttttattttctattttcaagtacgttggggctctatatttaatttatattggtattaaagcccttttagcagtaagaaataaagaaggcattgatacgaacgatatatctttgaataatgaagatgaacacacctcttgctttcgacaagggtttcttacgaatttattaaaccctaaagttgcagtattctttttaacgtttttaccgcaatttttaaatccaaatcataatacgtttatccaactactcgtaatgggccttacttacctcgttttaacagccatttggttcgctttttatatatttttaattgataaaattagtgcttttatgaaaaaaccgaagacgcaacgttatattcaagggctaacaggagtcttcttaattggttttggtattaaacttgcttttgaaaaaagtaattaacaagatgaaaaccaccactattaatagtggtggttttcatttaataactaatttggctgtttattttatattaaaaccagcgctcagttacaacttttttacgtgtatagaattgaacgccatctgtgccatttgtacctaaatcaccaaagaatgacgctttatttcctgcaaatgcgaagaatgccattggtgctggaacatttacgtttacaccgatcataccagcatcgatattatcacggaacgtttgtgcatgtttaccgtttgatgtataaataactgcaccatttgcaaatttagattgatttgttagtttaataccttcttctaaatctttaactcgtacaatgcttaatactggagcaaaaatctcatcttgccaaattttcatttcttgattcacgccatcaaagattgtcgcacctacaaagtaaccttctccaacttcttcattaattttacggccatctactaataaagttgccccatctgctacaccgctattaatgtagcctaaaacgcgctctttatgagattcacggattaatggtccaacatagttctcttcgttaaagccatcgcctacttttaattttttcgtttctgctactaatacatcaatgaattcatcagcaatttcatccactactgctactactgagcatgccatgcagcgctctccactacttgcaaatgcagatccaattacaccttgtactgttttctcaagattgcaatctggcattacaatcgcatggtttttcgcacctgctaacgcttgtacacgttttccgtgtttcgtacctgtttcatatacgtaacgagctaccggctcagagccaacgaacgaaacagcctgaatatctttattttctaaaatgctatttacaacatcttttccgccttgtactaaatttaatacgccttttgggaaacctgcttcatagaataattctacaagtcgctccgctaaaagtggcgttctttcagatgtttttaatacgaatgtattaccgcaagcaattgcaagtgggaacatccataacggaatcatcatcgggaagttaaatggcgtaataccagcaacaactccgattgggtagcgccaaatcgatccatcaattccgctagcgatattcggaagtgcttgacccatcattaaatttggcgtagatgttgcaagttctaccgcttcaataccacgttgcacttcacctgttgcatccgttagcgtcttaccattttctagcgtaatgatttttgcaagctcatctttattttcttgtaatagctgtaaatatttatataaatttcttgaacgatttggaactggtactttagaccatgtttcgaatgctgcttttgccgcttcaacagctttttcaacatcttcttttggagatagtggaacgtaagcgataatttttccagtcgctggatttggaactgcttctacttccgtacctgtcgattcaacccactcaccgttaatgtgattttttactcgtttaatttcagttgtaatcattgtattctctcctttgtataatttatttttgattagaaattaattgctcgctaactttcttatataaagcagccatatcgttttcaccatatccagcttgactcgcttcgtcatatacgtttaataacatttcgcttaccggtaaatggagttcgctttccttagctaagtcaactgcaaatcctaaatcttttttcaataagttcacagtaaatcctggctcgtagttttcaggcgctataaaacttttataattacgttcataaattctactttgaccgtaacttacatttaaaatatcaaacattttatctaaatccatattgttctttttcgctaatgttaaagcttcactcacaccagctgtataaaaaccaattaataagttattaattaacttaacagttgtaccactatcaatctgctcactaacgtggaaaatgttcgcgcctagtacgcccatgatagattccgttttctcatatacctcttttgatccaccaaccataaacgttaatgtacggttttcggctccgattacaccaccgctcacaggtgctgctaaaaagtctactttcttttcctttgcagcttcctctaactgtttgtttaactgcggcgataccgtacttgtatcaatgaaaactacattcgagtgaccattttcaaataatccttctgctccaaaatataccgcttcaacagcgcgaggtgaaggtaaacttgtaaaaactacatcacatgtttctgctagttttgagattgatagaccgataattccgccttctttttcaaaggacgcttccgcctctttatttaagtccacgccatatactgtgtaacctgatttaactagattttttgacattggaaggcccatgttacctaaaccgataaaaccaatctttttcatatcgctttcctcctatttacacaatatatttcccgcgatttataatagctttcgcaatttctctcttcttcgtaaatacgttcgtgtataaaggcactaataattgacggatttcagctaaaatcacatgtctatcttgttcttttgtgacagctgctgaaagtacagaaatcgccgcttcttctactttacggtatccttcttcacaaataacatccgttatgagttgcttcgtacgttctttttcctctccatttttacgtactgcttttctcgtacgtaaaaacgctgattccatgatgtacacgtccgtcaacatatttgatattacacgtgaatattcttgttcttggtcaatttttagacctggagttttagagagcgttttcaaagattgtttcaacaattttttcgctaataaaatgtaacgatggtttctttctacatttgctacattactttctacttcagtgtcttctaattgttcgatttgcttcattaacattttagcaactgttaatctattaatttcgttcgttccttcaaaaatacgactaattcttgcatcacgatataatcgttctacctcatactcttgcatataaccgtaaccaccatgaatttgtacagcttcatctacgatataagcaagtgtttcagaagcatttactttattcagtgcacattcaattgcaaattgggacattttcttcataagatcttcatcgctctcatgaattgcttcatcgattacacctgctgtacgataagctgcactttcggctccatatgtagcaataatcatatttgcaattttctcttgaatcatcgtaaagtctactaattccgtttggaactgttttcgctcttttccatattgaaccgacaaaccaattgcttgttttgctgttccaatatttccaaaagcaagtttaagtctagcaaagttaagaatattaagggctacgtgatgccctttcccaacttcccctaaaacattttcagcagggatgacaacatcttctaaaataagagtcgctgttgaagaacctttaatccccattttcttttcttctaatccaatagatacaccttcacatgttctttcgacaataaacgctgtcattcctttatttgtcttcgcaaaaacaacgtatacatctgccatatgagcatttgtaatccattgcttctcaccatttaacttccaagctgttccctcttcattcaatacggcgcttgtttttgcacttaatgcatccgaaccagcatttggctccgttaaagcataagccccaatccattctcccgatgcgattttcggtaaatatttttctttttgctctttcgttccataatatatgtaaggcaatgtaccgacaccagcgtgtatattaaaagaaacgctaaacgcaccagcgtaccccattttctctgctacaagacctgagacagcctttcctaactcgaacccgccataatcttctggtacctcaatgcctaataatccaagttccccagctttctcaaataattgacgagaaactttatagttatgttgttcaatattctccatttgtggaacaatttcttgtttaacgaattgttctgtcgtttttgcgattaaatcttcatcacctgaaaaatcttctggtgtaaagtaagtatgatttatatctttattaagtgaaaaaaattcatcccatggtaacttcgttttctccatatgtatccccctatcattcggctttcatagctttttgcttatgctcgtctacgatgagtggaatatcttttttgaaaatagaaggcgatgatttttcacatcaagcattttattttgccaaagatgtattttcatcgccttcgctgctttatctattgatcttctgataatactgtttttgcaataccagtatctaactcttcaaagtcatgatatgaaattgtttcgtataattcacttctcgtttgcatattagaaagtgcatctttttgagagcctgtttctttaattaaagtaaacacattttcatacgctttcgctgcaacgcgaagtgaagttacaggataaataaccatttggaagcccatattcgcaaattcctctgcactataatatggagtttttccaaattcagtcatattcgcaagcaaaggtgcatttaccttactattaaatagacggaattcttcctctgattgaagcgcttcagggaaaattgcatctgcacctgcttttacatatgcatttgctctttcaattgcttcatctaatccttcaacgccgcgagcatcagtacgtgctacaatgtataagctcggtgcaacttctttaatcgctttaattttttgaaccaattcttctgtagtaacaagtttcttaccatttaaatgtccacatttttttggtaattgctgatcttcaatttggacagctgctactttcgcttccaccatttctacagctgttctcgccacatttagtacaccaccaaatcctgtatcaatgtcaacaagaacaggtaagtctgtagctcttactaaatctcttgctctctcagccacttcagtagacgtcacgatacctaaatctggtaagcctttacttgcagtataagcagctcctgataaataaagagctgaaaaacctgtattttttgcaactaaagccgccattgcgtcatgagcacctggaatttgcaaaatttcatttgcttctactaaagctcggaatcgattcgcaagctcctcttgtgttgactgctttttcacaacccaagccattctaaattccccctattattaaattaagaatagatctacaaattcgtttacattcatattttctagtttttcttcatttaaacaaacttcatgaatttgttcttgttgcttactagaataatgacctgccatatttgcagtgaatttttgaacaacttttggaattgcttcgtctctacggaagcggtgaccaagtggatattcacattccacattttctgttactgtgccatctttaaagtgaacttgaacagcgttggcgattgagcgcttgttcgggtcaaggtaatctaaactgtactgtttgttttcaacaacaaccatcttattacgtaattcatctacacgtggatcgtttgctactgcatcttcataatcgtctgcaacgatatctccttttaataaaccaattgccgtaatgtattgtaagcaatgatcacgatcagctgggttatttaatggaccttctttatcaataatacgaattgctgattcatgagttgtaattgtaatacggtcaatttcatctaatctctctttaatttccggatgcaacttcactgcacattctgcagccgtttgtgcatggaattctgctggatatgacactttaaataatacattttccattacatatgactctagtggtcttgctaattttaattcttgtttattgaataatacatcttggaatccccatcctggcgcagataatgctgttggataacccatttcaccttttagagcagtcattgcaagatgaacaccgcggctcgttgcgtcacctgcagcccatgatttacgtgagcccgtatttggagcatgacgatatgtacgaagactagaattatcaatccacgcatgtgataatgcattaaagatttcttcacgtgttccgccaagcattttcgcaactactgcagttgttgctacttttacatataatacatggtcaagaccaactctgtttaagctgttttctaaagcaagcacgccttgaatttcatgtgctttaatcatcatttctaatacttcacgtacttttaaagcttcttttccttctgaaatacgaacacggctaatataatctgcaactgctaaaattccgcctaggttatcagatggatgtccccactctgctgcaagccaagtatcgttatagtctaaccaacggatcatacatccgatattaaatgcaccttttactggatctagtacataagacgtacctggtacacgtgtaccatttggcacgattgttcctggcacaactggtcctagtaatttcgtacattctggatattgcagtgctaaaattccacatccaagtgtatcaagtaatacgtaacgagctgtactgaatgcttctgcactagtaacctctttatttaatacataatcggtaatctcttctaataatgcatctttttgcttaatttcatttgttttaatcatgctattctttcctttctgtcgaaaattcgttattattaatgatgggtgtcggtcaaacacccatctggcgggcggcgctaacaactccccagttgttcttatttactaagtacatgtcgctcgccaatataatttacacgtggacggaacaaacgattatttgcatgttgctcaataacgtgcgcacataaccccactgttctagagctaaagaagattggtgtgtaaagttgaattggaatacctagcatccaatatactggagctgcataataatcaagatttggataaattcctttttctttttccataatcttttctccagcttcacacatttcatatagtgtataatcaccttttacatcacataactgttttaaagcttccttcatcataagtgctcttggatccatcttcttcatataaacacggtgtccaaagcccataattttttctttgttatatagtttcttctgtaataactcttcaaatttctcaacattaccagcttctaaaagcatgtacataaccgcttcatttgcaccgccatgtaaacttccttttaaagatgcaactgcacctgttagagcgccgtataaatctgattgtgttgatgcaataacgcgagctgtaaatgtagagtttggcatttcatgctcactatataaaacaagggaacgatcaaagatcttttcctcaagttcagttggttttttaccagttaacatatagaagaaattcgcactataagataattctttaagaggttcaattggctcctcattatttaaaatatgatagctatttgctacaatgtttggcactttacttaacagcttgtaccctcggcttttattcacttctaacgagcggttttcgatatcattatcgtaaccagctaacgctgacacacctgtacgtaatccatccatgggatgcgtctctttaggcaatgcctttagtacgttgaatacaccttctggtactgcatattcttcttttaatttcttttcaagtgttgctttttcatcttcattcggtagatgttcctccaataaaaggtgcacaatgtctaaatactcttttgtttttgagagttcgattaagtcatacccttgaattacaatttcaccttttactgtgtcaagaaacgagattttcgtctccgctgccactataccatctaatcccggggaaaatttctcttcagctttcatcattatttcctccaatcctaatagatcttcgtgcacataactgtaagcctttacaatattgtgaaactacatttctatttcaatgtatcagagtttttagaagatttcaatttattttataatgataagtttcctacacttttcttaatgtaacaatacaattttttgaaaataattcttatattttataaagaaaggatagacttctttgcgtattttcaaaaacaaaatataaagatttttcatataacaccgccaaatatacaattattctaattttatttgagaaatagaaaaaacgagctgtacataaatacagctcgttactatatgatatttatttcactatctcttaaatataatttttatataaaacttattcatttttaataaagttattattttacataattaaattgaatttcttccatttcctcatgataacttacaaataaatcatagttttgaaaataccaaagatcatcacaatctacaaaaaatataataccttccttctcaactgacactatttcgccatcgggtctctcagcaacaacccctaaagaatatccgggctgaattgaactatcccctccgtaccttacagtaaaacgtacagattcaccgtgctttatacgtaattcttcctggaaccattgcagagctttacgatcaattgaaattctcatctttattcctccagtttatgcaaactctttttttcctaatcgttgttttacaaaaaagacgaaaataattaaggctatcaatgctgaaattgcactccctgaaaataaaatacgataaccaaacatttgtgaaacaactccaagtaaaatagcacctaacccgattcctaaatcaaacgctgtaaaaaatgaagcatttgcaactcctcttttactcggatcgacaattgtaagcattgccgcttgcaaagctggctgcgctgaaccaaatccaataccgtataatgttgctgcgataattacacctatcaaaccatttgaaatagttaaaacaactatagctaaaatagtaatacataatgctggaagtatgatgaatacttctccatacttatctaatagtttccctgaaattggtcttacaattgttaatgcaattgcatatacaagaaagaaagttcccggattcacatgaattgatgatgcaaataacggtaaaaaggttgttattcctccatatgcaaacgataaaaagaatactacaatcgtgattgttaatacagatttctcaaatagctgcatcttccctttttctttttgtggtgtaaatggcatcttcgttattaatgataatacgactgccataaaagataacaacgtcgctaataaaaatagaccatcaaatgaataattttgcacaacccatagtccaatcataggtccgatcgccattgcaattgtcatcgccatcccgtaccaacccataccttcaccgcggcgtgaatctggaataatatccgttattgctgttccaacagctgttgtagaaacagcccatgttactccgtgaataacacgtaaaacagctaaaaggacaatagtcgatgctatattataggaatacatcgttaagccaaaaaagatgagtccgaaaataataaaggatcttctaccatattgatctaacattcctccaataatcggtcgtattacaacagcagctattgtaaacatccccatcataagtccaacttgcgattcattgccacctatctctttaataaagagcgggagcgttggaacaagtaaataaaatcctgtaaataaaaataacattgcgaaagtcatttgaataaatgatttcgtccataatcgttccataaaaatacctccatacactcgtaaaatattacgattaacaccttcattgtatattttttttatctcttttccctccgcaaatagacgtatcttttcatattaaatagtccaccatcagcttacattagtcttaagactttgtacgcatgttttaaacaaaagtcctatataatatgtacctttatatgtgtgaaaagaatatactaatttattaactcaacttaggagtgaatatttcatgtgggtattattaagagtaactgccgtagttccttcgactcctgggatacatgttcctgcagttcatacagctagctccgatgtaggaattgaacttcccgcaacttggcagcaatatcaaattcccggtcaagttaccccatcattttggcatcatggtacacaccccagtagtactcccattcatagccatagttatcctccactacctccgactcaagtcttttatcatttcccatcaatttattttcaaaatttttatggtacgtttaacatttaaaacagatcctttcatagctactacatttaaacgaaaaaagcacttaagattgtaaatttcacaaatcttaagtgctttttaatattttttataaatttttcttattgcccattattagcaggtgcctctcctgcattaccaccggtcgctggtggagttgtatttccttgacctcctccgttatttgctggaggtgtcgtatttccttgacctcctccattatttgctggaggtgtcgttccttggccatttccattattttgctcatcttgtttcttttgctcttctagtttcttttgttcttcttgcttcttaagttcctcttgtttcttttgttcttcttgttttttcagttcttcttgtttctttaattcttcttgctttttctcttcttcagttttttgctgttgatcttgttttggttgctccgttgtatccggtacgctagtatttggcgatgaatcacgtttttcaccttttatacgtagctcactaccttcttgaataacgctacttggcattttaaagcgtgatttatctgtagccatttcgctcatcatttctttaaagattaactgtgcaattttcgtgtttttactactaatatactcgtctttaccatctttcatatacccagtccatactgccatcgtatattgcggtgtatatccagcaaaccaactatcacgagttgcactttctggaattttatattgagctaattgctttgatgaatagtttgtcgtacccgttttaccagctacatctaaagagcctacatttgccgatgtaccagtacccgatgtaactacagaacgaagcatatcagtaatcatgtatgcggtagaatctgtcataacttgttttggtttttgtccaaaactttgtgacttaccgtctggataaacaactttcttaacaaaatgcggtttcgtatatttaccttcattaccaaatgccgcataagcacccgctatttcagttggcgatacttcatttgtaccaatagctgtcgattctgtcggtgctgtattaaatgtaatacctagtttctcagagaattcttttgatttactaatccctacttcttttgcagttttaattgcaggaatattacgcgacatttttaatgcttcacgcattgtaattggacccatataacttctatctgcatttcgaacttcttgacccgttgaatacttaaatggagagtcatcgatttgatgatacgtagcccattttaaatattcaattgcaggagcatagtcgaaaatcggcttcatcgttgaaccagctgcacgatctaattcaattgccatattatgccctttaaatacagctttattttctccacggccactacctatagcacgaacttctcctgttttcgtatccataaatgtgaatgcaccttggaatttatcgtttggataatcaatgatattattatttaaaatattatcagcaagtttctgtgctttcggatctaacgttgtataaatttctaaaccgtcagaaccaatattagcatctggcaattctttttctacttctttcacaactgcatccataaatgcagggtatggcattgtttgtagttgagctgcaggcttaagccccttttctacgtcaacttttgatgcttcttccatttcctgttttgttatatatccatgtcggttcattaaacttagaacaacatttcttctttctgttgctttttgaacattttcttttttcgttggatcatagttattcggtgctttcggtaaacctgcaagcatcgcaacttctggtaatgttaagtccttcaattctttaccatagtagttttgtgctgctgttgcgataccatatgaacgattacctaagttaattttatttaagtacatctctaatatttcatgttttgaatactgttgttctagcttataagctaaatatatttcttgcgccttacgctttggtgttttatccatagataagaagtagtttttaataacttgctgcgttatcgtacttccaccttgagagccataatctcctttaagactcactaaaacagcacgggcagtacctttaaagtctactccgctatgctcataaaaacgtgaatcttctgtcgctaaaaatgcattttctactaatttaggtatttgatcatacgtaacattcgtccttttttcttttccatattcatataccaaatccccgtttttatcataaatttttgaggataacggattaacaagttttgctttttccagttttggtgcgtccttaatcattacgaaaaaggtagcaacccccgccactaaacctacaataccaagtaataaacaagtaattaaaaacttgcggaaaaatgatgttttaccttttggtttttgtgttttagaagctggttgttttttctttttaacttgtcgtcgctcctcgcgagaacgataattttctgacatgttactttctcctgcctttcaattctcccgttgatttaattaaaaatattgaggtcactttcgtaaatacgtttaggcaagaaagtgtattgacctggagcattcaatattttcccaattcacagattacaaattttaaaatggctcttatacatactattttcacttctaattttctaataatgctgccccttttagcataataatgaaagaagtgaatttttattacctcgtataaataatatacctttttttcaaatggtcaatattttcttattaataaatcaaaggtgaaataaaaatagcatatcaatatgaacttcgtgtgaacttacttataattacgtataaccaatattaaatatattgaatataggtataatacctctttaattataaagatttcaacaccacaataccgttacctacaaagaattattaaaaatgaaaaataaggagttgcataataatgaagctatctccggttacctcaaaaaatatagttgctgttggttataatcctttttctatgattttgcgaatccaattaaagcatggtatgtatgatttctttaatgtaccagaaagcatttatactggcctattacatgcacaatctaaaagttattatcataatacttacattaaaaattctttccgccacacaaaaatttaaacttaacacccactaaaaaagaaaggaggtgaatcctcctttcttttaaaaacattttacagatgaattatcttcggttcctcttattaatttcatcatatgcttgaatttgttttttcaaacgccgatcagcttttttatcatgcactacaagaattgcatgtataactcctggaacccaaaatattaatgttaatatgaaatttattattgcctgaaatggttttccacaaaacaatacagcaacaggtggaagaaaaattgctaataaatacatcatcccttgaaaactccttattttgtattttatatatcacttttcaaaatatacgcaaaaaaacctactaccattttaatcttaacctgcctctaaaatcaatgtatctccttctatttatataagtatttcagacttttcattgttttctagcctattttcttcctctattgcagttattccaattgcggaaattaacgttcctatcgcttgtatccaaataccaatgagtgcaatgattctctcatccttcttatcaaaaatattatctttattttctttctcatctttcaatacatttaaaacaccttgatacgcttgtaatccagcccctaaactttgcatggagttacccagtataataattttctgtaatacatttatatccaccaaagctgcttctactcctaaaaaagcaccgatcgattgtaaactgttccctgtaatgataagataatcattttctttcaattgttcatttatattaaaatatgttcctattacatttgatatattgcctaatgctaataactcaattcctatctgatcaagtaatttactttgattctctaagcctatattttgattttctcttttttcttccccatcatcatacttgctcgcaatgatttgtaatatatatccgagggcttgtaatgagcttcctacaataacaagatccgattcaactttctcttctccaataaatcctcttgtcgttccaatagcagctgtaagattccctcccacttgaaaccatgcccctgtcacttttaaactgcttggattcatttttatcacctattcaaatattttctaaagctttcaaaacaaacaaatctcacccttaatcttttattttatttttcagatgtaattttgtgaatgatataatgtgctactaatataaaaagcaccttaaaggtgctttttatacgcatgctgggcatgtcaatgaatctccatttttatctattgttatattcaatatatattcaatcgctttatgtgaccaagtttcaggtgtaggcgattcatttatatattgtggcgcacatgacttcagcattggagtattaatactccctccaggatctaaagcaactacagccatgccatggggtaattccagggccatagatttagtgataccttcaattgcaaatttcgaggcacaatatggcgcaagctcagcttcaccttctctcccccaactagaactcatattaatgataattccttctttcctagctaccattgcgggaacaaatgctcttattacatttactacaccattcacgtttacattcattacattttcaaattcttgagccgtaattttccaaagttgtgcattttgatttacaattgatgcattatttattatcagattgggagccgtatgtctattaagtatataatttgcccaattgttaacttgctgagaatctgaaacatcagttacttggaaatcatgtattttactgtactgtttttttagttcttcaattttatcttttgaacgtccacaaccatatatgttccaccctaattcatgaaatcgatcaaccatcgcacgtcctaacccttgtgtcacgcctgtaataattacagatttactaatttcttttcgcttcatttccctcatcctccttccctatatcttactctcttcatttttattcagcgatttactatagtatcaactcaactcatactttagtaatagttttgatattgcatacataaacaaaaaagtaaccatcatggttactttttgctatatatctaaaaattcattgtttatttcattattatttttatatttcaacttctcttttccacatttctcacactggtaaatataaactacacctaatgtaccttttttaaaatcctcattatcctgcatcttaataaaaatatatttatgtttacaatgcgattcacccaaataatttctaaaccactttttcaacacaacacattccacctttatgatagaacctttatttagctgctttattacatactcttatttaaatgttcaatctcatcttgcaattttttaaattgctcaaaatgcatggtaatagattggctactaccataatcaacattttgtttcactaatataacacccgtatcatgaaaaagcgcttcaagttctttcctaatagacactttcgcaatatgagctgttttaattgcagataaaattgcaatttcattaaactttaattttatttcatttggacaaaatgcgtcttcaactaatataacttcattactataaattagtgcaacaagattacttgatttggcatctgttaaatcaacttttttcataatatctttcattacattttgcctcctttattttcatatatatcaattatacaaatttttttaaaaaattactcaactttattatattaattttaacacacttttattgaaatccacgctccaaacgttttactattccacaatttttattgtatgaaccatctgaactataactccatatagtaatgttaacaacttattataaagcaggtgaaaattatgccatcagttgtaggaaatttagttgtacaaaatagcaatggatcatttaacttaggtgatttctacaacgtatctccgaaagaaaatacgaaagcttataatggttccggcgcatcaaacgttggttttgttgttaatacttttagcggtgttagcgcgaccaatacatttgattctgaccttgcagatcaaaaccaagtgggtacagcctaatcttatgttcaactttctgtatagaaaattttaatttgtctatactataatcaggctgtttgacagctcttgtcgattttggagtaccctatctttttctccctttccctggggctcagcagctagcacgaagctagctgctttttcttgtattatttgtctcataaatcagaaataaaagaagctgccatttaatactcagcttcttttacgttatttcaataatatccatagcgttaaatacgtaagttttataaaaagcgtctgtacaaattacaatttgttttaccggattgatatgtacaacagtcatgtagcttgttagtatgtaaccatcttcaaaatatgttaccaatatttctttctcagacagtaatgacgttaataatttatcagaaattctctcttttgcttcatttgttaaaagcggtttttgtacttttaatttctctccaataatctttctcatatttaaaagtcgttcggacattactgtaaacggaacccactctctttcttctttttgtatctttacatcgttcattttttatctccttgatcatttatacatttatttagccatactatcccttagttatttttaatacttactaaactcgaatttacttctaaactataattaggttacttcttaaaagaacattcgttcctattatacacgaacttacgttcttttgagaagagccatacttattatttcttaacaaaaaacataattttatttatctccatacttttttcctttatcaaataaacttctcatttcttatataacatgcatataacaactaaaaggcgacttcacccaaagtgaaatcgcctttttctaaaaaatatttcaaagcttatttttctatcctaactaatgttctttctggaatacataattcatctatattaaaatgatttatttttaagtgtaaatgtcaagataaacatgtacattttcgcttgtttaagcatgtacaaaatccctttgataactaaaaattcttttgtttttcagttgacatactaccgcaggtcttaaaatgtagtataatcattttaccacaaaacacgaacgatggctaaattttttaagtataatgttcgtgttatatagttgtctagatgattggttatgtaaattcaatttgccatttgaaataacattccgtaagatgagagatagagtatatttagagctggaggaaagaaagtggaatttgtatttttaggaactggtgcaggtgttccttcaaaaggaaggaacgtttcagcaattgctttacaattgttagaagaacgaggacaaacttggttatttgattgtggcgaggccacgcaacatcaaatattacatacatctgtacgtccgcgccgcattgaaaaaatatttattacgcatttacatggcgatcatatttttggattgcctggtttattaggtagccgttcatttcaaggaggaactacgcctttaacggtgtatggaccgaaaggaattaaacaatttattgaagtggcattatcggtaagtacgacacatgtgaaatatccacttgaagttgtggagataacagaagaaggtaccgtatttgaagataatgaattttatgtagaaacgaaaagattgtcacacggtatagaatgttttggatatcgtattgtagagagagatatacaaggtgctcttttagttgataagttgcttgagatgggtgtgaaaccaggtccaatctttaaacgtttaaaagatggtgaagcagttgaattagaggatggcacgatattaaatggaaatgagtttatcggcccacctcaaaaaggaagaattattactatcttaggtgatacgcgatattgcgaagcgagtagggagcttgcgcaagatgcagatgtacttgtccatgaagcgactttcgcagcagaagatgagcaacaagcgtatgattattttcattctacatctaagcaagctgcgagcattgcacttcaggcaaatgcgaagcgactaatattaactcacattagttctcgctatcaaggagatacatataaggaattattgaaagaggctagagagttgttttctaatacagaaatagcgacggatttgaaatcattcccagtagaaaaatgataattttataaaaaatggtaacggcgggttaccatttttttttgtctaaaaaaatttaaaaataaaactgttattattttatacttatacttggatgatacagaaaattaggatggtttgaatatataggataaaaatacgaaataatgattatttagaaaaactgttatataagtcagatgacatacaagtgatacaaatagcagaaatggacttttattcagaacttttaaaattcaacaaaagtaagcgttttataaaaaacaagctataatgagggcagattataatttatgataagtcacatgtattttagtcattatcgtaacaagtgaagttgactaaatcatgagagagtaacacgagaattataataggaaagatattactattatttgtcataagtctttttcactttttagctaaacgatatgattagcgagtgtatctattgcaagttccttagttgaagctttttattaataaggtggtggagatttaattggtaggtataccactctttaaaagagttcagaacatcagcaggtagtctaggtggaatagcgggtgcaaatttagttgcattagcaatggttatatcacttgtttatgctatgcttgcaatggcttctgtgttaaactttggattgctaccagactttattgtggattatcttgtatcatttttaaatgaaaataatgctaagattcttatgtattatgataactggtgttatttcaggttatattggattacttttattcaaaaactatccaattcgtatagcagaacaaattcgtggtacaactggaaaagcgacagatgtagcagcttaatagaatagtagaataaatttttttcatagaggtttagggggagttatgatgaagtatcgctcagtatttgatattatcggtccagttatgattggaccatcaagttcacatacagcaggcgcggcaagaatggggcaagttgctcgccagctgtttcgtcatgaaccagaaagagtaagcatttcgttatatggatcatttgcaaagacgtatcgagggcatggtacggatgtagcactaatcggtggaatattaggatttgaaacagatgacttacgtattccagaggcgctagaaatagcaaaagagcgcgaaattgaagtggaattcattgaagaagatgccaatgcacctcatccaaatacagcgagaattcgtttgtataaaggtgaagatgaaattgaagttgttgcttgctcaattggtggcggtaaaattgaagttgtagaattaaacggattcgatcttcaattatcaggcacgagcccagcactacttattgtaaataacgatcgctttggtgctattgcagcggtagcttcaatccttgcgaaacatgagattaacattagtacgatgagtgtatctcgtaaagaaaaaggaagaagagcgcttatggtcatcgaaacagatgaattattagcagatgaagtaattgaagaaataaaagcgcaacaaaatatttgtcaagtaactattatggaataattgcaggggggacacaccatgtttcggaacgcagcggaactagtggcgcaagctaaagaacaaaatgtaaaaatcgcagaaattatgattcaatgtgaaatggaaacaagaagtatttcacgtgaagaagtaattgctggtatggaaaagaacttagtagtgatggagcaagcagtagaacgtggtattcgcggcgtgaaatcaccaactggtttaactggtggagatgctgtaaaagttcaagcgtatatgaagagtggaaaaggcttatctggagatacgattttggatgcagtaagcaaagctgtggcaacaaatgaagtaaacgcagcgatgggaattatttgtgcaacaccaacagcagggtctgctggaacagtgccaggtgtactatttgcactaagagaaaaattgcagcctacacgtgaagaaatgattgaattcttatttacagcaggagctttcggtatggttgttgcgaataacgcttgtatttctggtgcggcaggaggatgccaagctgaagttggttcagcaagtggaatggcggctgcagctgcagttgagatggctggtggaacacaagatcaagcagctacagcaatggcaatttcattaaagaacatgcttggtttagtgtgtgatcctgttgcaggacttgtagaagtaccttgtgtaaaacgtaatgcagcaggagctgcaaatgcgatgatctcagcagatttagcattagctggtgtaacgagtacaattccatgtgatgaagtaattgaggcaatgtttagaatcggacaaacgatgccagtagcacttcgtgaaacagcagaaggtggacttgcagcaacgccaactggtcgtcgcctgcaagaagagatttttgggaagaacaataactaagtgtaaattatagaaaaaggagctcaaataaacttgagctcctttttctatttttcttttgttagttgttctaatgtttttccaagattatgtgatcgtttcgttgcctgtgtaatacaagaaacaagtgcttgttgaaatttatgttcttgtaatacttcaatacctgcctcagtagttccaccaggagaagtaatttcctttcgcaaaatagaagggtgtttgtcacttgcttttaacatttcagcagcaccaatcatcgtttgaagaataagtgattttgcaatatcttcttttaaaccaatttttgttgcagcttcttccatagcttccactacgtaataaatataagcaggtccacttccggataatgcagtgacagcatgcatatcttcttcctctacaacagagacgagaccaatcgtttcaaataaagatgttgcagtgtgaatatgttccgctgttgcatgttttgaaggggagatagcggtagctgattttaaaatggctgcggatgtatttggcattgcacgaataattggaacgtctttttgaagtagttttctaattgagtgagtagaaacacctgctagtaatgaaataataagcacgttattatttatgtattctttaaaaggggtaagcgcctctgcaacatcctttggtttcattgctagaaaaagaatatttgcatcagtaagtaattcttttttattatgagtacctttgacaccgtattttttatgtagctcttgtaatcttgtctcgttagaacgattacttacagtaatttgttcacctttaacgacatttgcatgtaacaagccaccaataatagcttcggcaatagagcctgcaccgagaaaggaaatgttttgaatagacatgatgttcctcctttaattttggttagaaattcttataaatgtacatacattcgtttttttataggaaacacctctttttatctgaaaataatgacaaatatatatagaagttgtaaactgaagaagtattcatttttgaaccggaaagagacaggggggctaagcatgacggcgattcaccgaatggagattcctgtaccatttgcagtggaaactgtgaatgtgtttttagttgagggggagacattaacattaattgatacagggacgaatacagaagaggcaaggaatgcgttagaaagtcaattaggtgcattaggacatacgatagaagatattgaaacagtagtcattacgcatcatcatgcagatcattgtggacttttaaatatattttctgagaagacgaatattattggacatccttggaatgagccttggatcacacaaaatccagaatttttaaagcggtatcatgaattttttagagagacggccttacagtttggtgtgccagcagcatttttgaaagacgagtcgttattgacgacgaggacacttaaatattcttgtaatagatcgttaacgcatactgtgagagaaggagatcgtattgattctttgcctggatttatagtacttgaaacaccaggtcatgcttctactcatatttctttatatagagaatctgatggaatattaattggtggagatgctctcatcagtcatatttcttcgaatccaatactagaaccaccatatgaagggcaaacagaacgggcacgcccattactacaatataatcaaacattacagcgtttaagcgaaatgaatatttcacgcattttatcagggcatggggaagatgttctaaatgtgaaacaacttattgaaacgagattacaaaagcaagaaacacgtgcttttaaagtgcttgagttattaaaggaaaaaccaatgacagcatttgaagtatgtgtaaaactatttccggtattatataaagaacaattaccacttactatttcagaaacggttggacaattggactatttagcatataatcaacaagtgatgattgatgaatcatcgcaacaattgatttattatgcaaagtaggtgacagcaatgacaggacgtttacaaaataaagtaatcgtcattacaggtgcttctagtgggattggtgagcaagttgcaatgcaagttgcagcacagggagcgactcccgtattaatggctcgaacagaagagaaactacaagcgttagtagacaaaattaaagaaacttataatacgccttgctattattatgtattagatgtaagtgaagagatggaagtacagtctgttttttcaaaggtattacaagaagtaggacgtattgatatattagtaaacaatgcgggatttggtatttttaaaacgtttgaagatgcgtcaatggatgaagtaaaagatatgttccaagtaaatgtatttggattagtagcatgtacgaaagcggtactaccttatatggtaaacaagaacgaaggacatattattaatattgcttcccttgccggaaaaattgcaactccgaaatcaagtgcgtatgcagcaacgaaacatgctgtattaggatttacgaatagtttacgcatggaattagcgaatacagatatttatgttacagcaattaatccaggtccgatagatacaaacttttttgaaatagcggatcaatctggtacctatgtaaagaatatgggacgttacatgttaaaaccaacatacgtagcagaacaaatcgtaaagtcgatgcacacgaaaaaacgtgaagtaaacttaccgaagtggatgggaattggaccgaaactttatgctttattcccaggtttatttgaacgtgtagcaggtaaatcattaagtaaaaaataggaggtttccatatggaaatctcctatttttttattttccagtcacataatcgtaaacgatatcctcaactgcctcgtatacatcaatttcagtatttgaatgaattatcgtttgaatatgtttaattagcatttcctgatcttcttttgatattggactgcattgatattgctgaaaactttttataatcattttctcaattaatttttcgttcatattttttcccgcctgtatgtacgtatgtattgttttattgtacttgaagtgaaataaaaaaactaccatgcactatttttgtataaaaattcggttgtgtgtaatgtttttctagtaaaattaagtttttttacttttaaaaatttataaatatttaattgactctataaatatacaatattataatcatacttaatttaaagaatcgatttgaggaggaacttatgaaagtcgcaattattggagccactggatatgggggcattgagttaattcgtttattagaacaacatccatatttttctatagcatctcttcattctttttcacaagttggtgagtgtataacaaatgtatatccgcatcttcgaaatgtcctcgttcatacgttacaagaaattgatgtggagacaatagggaaagaagcagaaatcgtatttctagcaacaccagcaggagtatcggcggagttaactcccaagttattagcagaaggtttaaaagtaattgacctatctggagactttcgtatgatagatccttcgtcatatgaactgtggtataaaaggccagcagcgaaagaagaaattcttagaaaagcagtgtatgggttaagtgaatggaaaaggactaagattcaaaaggcaaatttaattgcaaacccaggatgttttgctacagccacattgctagcgatagcaccgttagtacgtagtagcaggattgaagaagattcgattattattgacgcgaaatcaggggtatcaggagcaggtaaaacaccaacaacaatgactcattttcctgagctatacgataacttacacatctataaagtaaaccagcatcagcacgttccagagattgagcaaatgcttacagaatggaatagtgagttacagccaattacatttagcacacatttaataccgatatcacgaggaatcatgattacactttatgcaaaagtaaaacaaaagatggaaataaagcaacttcaaaaattgtatgaagaaacgtatgaacaatcgcctttcatccgaatttgtacgcaagggaaatttccaagtccaaaagaagtgagaggctcaaattattgtgatattggcatagcttacgatgaaagaacagaaatagttacggtcgtttctgttatagacaatatgatgaaaggcgcggctgggcaagcgattcaaaatgcaaacataatagcgggactagaagagacaacaggtttacaacatatgccgctttatctataagggggacatgatgattaaagtagcgtctattacaaaattagaaaatggttcaattgtaacgccgaaaggcttttcggcaattggtactgcaaatggtctgaaaaaggatttaggggcaatcgtttgtgacgtaccagcatcatgtgccgctgtgtatacaacgaatcaaatacaagcagcccctttgcaagtaacgaaggatagtataacggcagaagggaagttacaagcaattatcgttaatagtggaaatgcaaatgcttgtactggaatgaaaggattacaagacgcatacgagatgcgcacattaggggcggaacattttggattgaaagaaaattacgttgcagtagcttcaacaggtgtaattggtgttccgctaccgatggatataatccgaaagggagttgcaactcttataccgacgaaggaagaaagtgaagcatattctttttctgaagcaattttaacgacggatctcataacgaaagaaacttgctatgaaatgattattgatgggaagaaagtgacgattgcgggtgttgcaaaaggttcagggatgattcatccgaatatggcaacgatgcttagttttattacgacagatgctcatatagagcatgacgtattgcaaacggcattatcccaaattacgaatcatacatttaatcaaattacggtagatggagatacttctacgaatgatatggtcatcgttatggcaagtggattatcagaaacaaggccgataaatatggaacatacagattgggaaactttcgtatgtgctttacagaaggtatgtgaagatttagcaaaaaaaattgcgcaagatggtgaaggcgctacgaagttaatagaagtaaatgtgctaggagctcaaacgaatgaagaggcaaaaaaaattgcaaagcaaatagtcggttcgagtcttgtgaaaacagcaatacatggtgaagacccaaactggggacgaattattagcagtattggacaaagtgaagtagctattagtccgaatacaattgacattactcttcaatctatattggtattaaaaaatagtgagcctcaaacattttctgaagaagaaatgaaagagagattacaagaagatgaaatagtcattaatgtgtacttacacttaggagaagagacaggatcagcttggggctgtgacttaagctatgaatatgtgaaaataaacgcttgttatcgtacataaggagagagaagatgagcgaatatattgtagtgaaatgcggcggtagtatgttgaatcaattaaaagctgtgttttttgaatgtataaagaaattgcaacagaagtataaagtagtgattgttcatggtggtgggccagaaattgatgccaaattaaaagattgtaacatcaacgtagaaaaaagagatggattacgcgtaacaccaaaagaagttatggatgttgttcaaatggtgctatgcggaagtacgaataaaaaactcgtaatgaatttacaaaagcataatttacttgcggtaggttgttcaggatgtgacggcaatttacttcaagttcaacctgtcagtgaagagataggatatgtgggggaagtaagttatgtagaaacagccttattaaaaggattaatgaatatggagtatattcctgttattgctccaatcggggtaaatggtaatgaagtttataacataaatgcggacaatgctgcagctgggattgcggctgcgttaggggcaaaagagcttatttttattacggatgtagatggaatattacatgaagggaatttggtaaaggaaacggatgaatctgaaattgctacttttatagaaacaggtgttattacaggtgggatgattccgaaagtacaggcggcactagcatcattaaaaatgggagtgcaaaagataagtattgtgaatggtacaaaagattttactgaggttacgggagagtgtattggaacgacggtaacgaaaggtgtgagtattgcatgacgagtcatctttttcaaacgtatggcagaagaactattgagtttgtaaagggaactggaacgaaagttattgataataacggtaaggaatatttagatttcacatcaggaattggcgtatgtaatttaggacattgtcaccctactgttctcaaaggtgtacaagagcaacttgatgatatatggcatatatctaacctgtttacaaacagcttgcaagaagaagttgcgtcattattaacagaaaatagagaattagattatgtgtttttctgtaatagtggggcagaggcaaatgaagcggctttaaagttagcacgtaagcatactggaaaatctctcgtcgtaacatgccagcagtcttttcacggtagaacatttggaacgatgagtgcaacgggccaagataaggtaaaagaaggatttggtccattacttccatcttttttacatatcccttttaacgatattaaagcattagaggaagtaatgaatgaagaagttgcggcggtaatggtagaagttgttcaaggagagggaggagtaatacttgctgatctatcttttttgaaagagattgaaacattatgtaataagttcggttccttatttattatagacgaagtacaaacggggataggaagaactggaacactattcgcttatgaacaagtgggaatagagcctgatatcgttaccgttgcaaaggcgcttgggaatgggattcctgtcggagcgatgattggccggaaagagctcggagcgtcgtttactgcaggatcacacggttcaacttttggcgggaattacatcgcgatggctgcagcgaaagaagtattgcaagtaagtgaaaaaccatcgtttttaaaagaagtacaagaaaaaggcgagtacgtattagagaagttgcaagaggaattacagcatgtcgaatgtattcaaaatatacgtggtaaggggcttatgattgggattgagtgtaagcatgaagttgcaagttttatagaacaactagaaaacgaaggacttctcgtattacaagcaggtcctaatgtgataagactattaccgccactcattgtcacgaatgaagagttagaacaggcagtatatataataaaaaaagtagtttgtacaaaaaacgtatcaatcatataagggggaagtttcatgtcaactgtacaagtaccgaaattaaatacgaaagatcttttaacactagaagaattaacgaaagaagaaattatttctttaattgagttcgctatatatttaaaaaagaataagcaagagcctttattacaaggcaaaatattagggcttatttttgataagcattcaactcgtactcgtgtatcttttgaagcaggaatggtacagctcgggggacatggtatgtttttaagtgggaaagagatgcaaatgggaagaggagaaagcgtttcagatactgcgaaagtattatcgcagtatattgacgggatcatgatacgtacattctcacacgcggatgtagaagagcttgcaaaagaatcgagtattcctgttattaacggtttaacggatgatcaccatccttgtcaagcattggcagaccttatgacgatatacgaagaaacaaatacatttaaaggaataaaattggcttacgtaggtgacggaaataatgtatgtcattcattgttgctagcgagtgcaaaagtcggaatgcatatgactgtggcaacgcctgtagggtatgaaccgaatgaagagattgtaaaaaaagcgttagcaattgccaaggaaacaggagctgaaattgaagttttgcatgatcctgaattagcggtgaatgaagcagatttcatttatactgacgtttggatgagcatggggcaagagggcgaagaagagaagtatactttatttcaaccttaccaaatcaataacgaacttgttaagcatgcgaagcaaacatatcgtttcttacactgtttacctgcccatcgtgaagaagaagtaacaggagaaattatagatggaccgcagtctatcgtctttgagcaagctggtaatcgattgcatgctcaaaaagcgttattagtgagtttatttaaaaatgtagaagagccttcctaaaagggaggtttttttatattaaaatgtcggatgtatatttggttaaccatttcgatatcatttataataaaagagaaaactaaatttgtttttcagagtgtgtaaggacatactacatataaaaatatagttaaagagatgatgagggtgaaaacaactaagaaaacatattcgtttttccagcggatgtggagaatattaaagtttcaatattataagttgcttcgatcgccagaaggcgcaaagaaagtatcgttagggtttgctataggattcggcttagaaatgttagtcatttatacggcatcgctcgtatatgtaatattttatccaatcgtcaggttagcaaagggatcttttcctgcggcagttattggcaatattattgggaaaatatcgtttctcccagtatttttatttccgcttgcgtatgcgctaggaaaaatgatttatccatttcatgtacagaaaattcatcatgaaccatttacgatatcggacttgttttcaagtcacatttttacgatattaaagagcttattacaaagtgaagtgtatgtattaattggaatgacgattttaggagttgtgtttggtctcatttcatatttcgttgtgcattatttatacgaaaagaaccgtaagttacgtttgaagaaaaggaagaaacgagtgagagaaccacttgtacaattataaacaatgtcacattcattttctcctttgaatatgtttaagaaaaaggaggagaggataatgtattattattacgtacctcaagtatatccatatgtaaattattatccggtttatgatacgagtagacaatacgaattatatcggcaacaacaattacagcaattatcacaaataccacaattaccaacacaacagcctacacaggaaaaaaaaccatatttaacaacatggccatattccaatgtatactatggtaattattacgaatcataaagctgcttctatttagaagcagctttatacgtttgttttcaaaattaaattttgaatggtttgaagagaatgaatgagcttttcgcgctcttcctcagataatgtttggaaattttcttttagtttgtctaaaatgaattgctgatactgatttactaataatttcccttcagctgttagagaaattaaaatgacccgtcgatctttttcgctataatgacgctctattagttcttcttgaataagtttgtttaatagaggtgtcatgttaggccgtgaaatcgctagccgcttgccgatttcggaaactgctaatgtgccgttttcatgcaaaagcagtaatacttgtgtatgtgatggcggcatatgtctttgagaagaaaattctccaggaagcataaatttgcgataaaaaagaggcactagcgaaagaagatgatcaacaatacgttcccactcgcgtgattccatataaaggcccccttccactatcattgtaacaaaaaagacatgttataaaaatagaattgtttcatggtcgctttaatatttgtaggataacacttgctttgtaaatgtattggcaataattgcatagccgttatcatttgggtgtacttggtcaaataataactcttttttatcatttgatattaatttgcgaattggtaaaacgatagatggttgatttgctttggaaatggaataaacagattcattccagccatctaaaaacatatctgcataacttgcgatggagtcatcgagttgtaacgggttatagagttctgagagaatgagtaaagcgtccggattttgatctcgaactgtctttacaatactttttatatccgcttcaaaatgggctttttctttatttaacatttttataccatctataacaccaacatcacgatttaaacgaaataaattatttcctccaatattaattgtaattatatttgctgctctaattttttcctttacatcttctgattgaacttttttagcgagacgatctgttgtaagaccgtttaccccaaggttttctactgtaattggtttatgaatttgtgcttctatttgcttagaagctaattcagcaaatccaccttgtgtcgatccatatcctttagcgagtgaatcacctaatacaagatgataaaaagattcgtttgtttgcttatcaatccaatttggggcagatgttttttctgttttttcttcagattcattttgttttgtctcgtcgttcttttcaaaataagaataagaaatgatcagaaggaggagacaaacaattgttaagatgacttttttcataaattcatcctccttgtaattggtaattgtatcatattcagcagtattagcaatgtaagggcatattatatgtttatgaaaagtttataataactttacagaaaatttgttgaagtttgtcaaaaaatattgacgataggaaagaactttatatatgataatgtcagataaggtgaaactttaatgagtgggagctttatttcctattaattgttagtcttcatcaatcgggcgtttaaggggactactcgttagcgcaggatgaaatgaaaattgtgtctctaatagaagaaaaaaggtatgtggttagagacagatagggattcatttcattatttctggtaattgtataagggggattttttgtgaaaaagtcaaaaaaaatgctggctggagcaactcttgcgattggtgttatagcaccgcaagtaatgccagcaacagctcatgcagatgagaacactggggagagtacagttaacttacgaattctagaaacatcagatattcacgttaacttaatgaattacgattattatcaaacgaaaacagataataaagtaggtctcgtacaaacggcaacactcgttaataaagcacgtgaagaagtgaagaactctgtcctatttgatgatggggatgcattacaagggacaccgcttggagattatgtagcaaataaaataaaagatcagaagaatcgtgtggatcctagttatacacatccattatatcgtgtaatgaatttaatgaagtatgacgtcatctctcttgggaatcatgaatttaactacggtttagattatttaaataaagtgattgaaaaaacggatttcccggttattaactcgaatgtctatatagatgaccatgatggtaatgatgagaatgacgagcattactttgataaaccatatcatattttagagaaagaagtagtggatgaagcaggccaaaaacaaatagtgaagattggtgtaatgggatttgttccaccacaaattatgaattgggataaagcgaatttagaaggaaaagtaaaggcaaaagatattgtgcaaacagcgaaaaaattagttccggaaatgaaggcgcaaggtgcggatattatagttgcactagcgcattcaggtgttgataagagtggatacaacgaaggaatggaaaattcatcgttttatttagcgacagaagttcctggcgtagatgcagtattaatgggacattcacatactgaagtgaaggatgtatttaatggtgttccagttgtaatgcctggtgtctttggaagtaacttaggtattattgatatgcaattgaaaaaggtaaacggaaaatgggaagtacaaaaagaccaatctaagccacaacttcgcccgattgctaatagtaaaggtaccccattagtagaatctgatcaaaaattagttaatgaaattaaagatgagcatcaagcgacaatcgactatgtaaatacacctgtaggtaaaacgaaagcaccaattaatagttatttttcattagtacaagatgatccttccgtacaaattgtgacaaatgcgcaaaaatggtatgtagaacaagaacttaaaaaaccagagtacgaagagattaaagatattccggttttatctgcaggcgcaccatttaaagcaggtggccgaaacggtgctacatattatacggatattccagctggaacgttagcaattaaaaacgttgcagatttatacgtgtatccaaatacgttatatgctgtaaaagtaaatggggcacaagtgaaagaatggcttgaaatgtctgcaggtcagtttaatcaaattgatccaaagaaaacagaagaacagccgttagtaaatataggctatcctacatataactttgatattttagatggcttaaaatacgaaattgatgtaacacaaccagcgaaatacgataaagatggaaaagttgtaaatgcaaatacgaatcgtattgtaaatatgacatatgaaggtaagccagtagctgatgatcaaaagttcatcgtcgctacaaataactatcgtggaagtagtcaaacgttcccaggtgtaagtaaaggggaggttgtataccaatcacaagatgaaacacgtcaaatcattgtgaagtatatgcaaaaaataaaaaatattgatccagcagctgatcaaaattggacgtttaaaccgattgttgcagataaattaaatacaacatttgattcttcaccaaatgcacaaaagtatataaagaaagatgggaacatatcatatgttggaccatctgaaaatgaatttgctaaatatgcaattgatataacgaagaaaaatgatgataaagaaactggtgaaggaaatccaacgacaccgccaacaggtgggggagaaaatccaacaacaccgccaacaggtaatggagaaaacccaacaccaccaacagaagaaggtaataatggtaatgaaccaaaacaagatggaaacaatactggatctggacaaactacaacagatgatcaaaatacaaaagaaacaacaacaactgtaagtgaaaataaagaagctgaaaaagatgaacgtgatttaccgaaaacaggtgcaagtattgcttctacaattggagcgggtcttgcgtttgttggagcgggattacttatgttatttagaagaaagaaagcgaatagatagtcgagaaatataaaaaggattaccgatttggtaatcctttttattatattatgaaactggtactgctttttcttttttccatgaaagaccgaatccagtaaagccgacgataatggttacgactggacatgctaaacagaagattgcgtatggcaggtaatcgaatgttggaacgctaagaacgtttgttaagaatacgccacttacaccccatggtacgagtggattaattactgtaccagcatcttctaatactcgtgataaattacgacgttctaaaccgacttcatcgtatttattagcaaatgcttgtcctgttaaaacgatggataagtactgctcaccgagtaagaagtttacaccaattgcagttgaagcagtagaaataattaagcgtgtactagtttttacgaagctagagataatattcatcagctgcgctataatacccattccttgtaataatcctcccatacaaagagctaggaaaataagagcaattgacatcatcatactttgcaggccaccgcgagataataagctatcaatatctttgataccagttttagaaacgtaaccgtcttgcataatttttattaaatcagctaaagaagtgctaggtttaaaaataaagagaataataatccctaccacaattcctgcaagtaatgttggaactgcgggtacctttttaaatgcgaataggaacagtaataaaataggaatcagtgtaacgatagaaatcgttgcatttttttctaatgtgttaataaatgctgagaaatcaacgtttccaccagatccgcttcctaaaatgaaaaatgcgataaaagcaataatgaaagctggcactgttgtccaaagcatgttacgaatatgttcaaataaatctacacccgttacagcaggcgctaagtttgttgtatcagataaaggagacattttatctccgaagaatgccccagaaataattgccccagcaataagagctggatcgtatccaagggcagtacccattcccataaaggcaagtcctacagttgcagcagttgtaaatgcactaccgatactcgttccaacaattgcacaaacaacaaaaacagttggaacgaaaatttttggagatacaagttggaagccgtataccattaaagttggaatagttccagctgcgatccaaatgctaattaatacgcctacaagtaagaaaataaatatagatggaataccagctgaaatactacttatcattcctttttccatagtagaccaatcaatttttttcataaatccaaacgctaataaaagaacgatgccaaataaaatcgggatgtgtggtgaaacttctaatttgataacactaaagccaatgcagaaaaagataaaaattgttaaaagaacagactcaatttttgaaaccattgttttcccctcctaagtaatgtgaaatagctcttttttatataaaattcgccaatattgtatatttccttctaaaatttagaattttgtgacaaattaccggtaattgttagttcttctatatgatgcggaaatgattggataaaaaaacgtccctgcatataattatgcagggacgaagaaatcgcggtaccaccctagcttgtgaaatgaatgtatcacaaaataaagggtcatatgatatgcgcttataaaataaaaaacgcccctgcaatatatgcagggacgaaaaattcgcggtaccaccctaaattgtgaaacagtgtcgtttcaccactctttagacataacggtctataaccgtccttcactactcctcacgtttcgtaaaagaagctccagggggtaattcataattcgctctgtactggttcgcaccgaccaccagctctctgaaatcagaaatcgaaatactactaaatcctatcaacgccgattcatatgatgttagttaaatttttatcatattttcatcttacatgtcaataaaaatattaaatgtttttttagggaaataaaggataattgtttttaacgctgtaaaaatgtacgttataatgaatttgaaagggggaggaaagagtgaagaaaaaaataattctttttaccactttattagttattggaggaagtgctggaatttacacagcttttgcggctgaatcagagcagttgaaacaaaagcaaatacaacagtcagaagtgaagaaagcgaaagaagctgaagagaagaaatcaatggaaaaagcagcagagaaactaggagtttctactgaggggaaaacaaaagaagaggttacgaaagaagtaaataccgctaggtttgataagcgtcatgatttattaattgagcacgctaaacaacttggaattgatacagaggggaaaaaagatgaagaaattattttagaaattggaaagatacagcatggaaagtagaacaacttatcatatgataagttgttcttttttaagaactatttgattttaaaataattgacagtcattcagatttaatgttaactatatttataaacaagttaacattaggggtgacaattgtgacaataaatagtaaaacgattgaaaaatcatcttatacatatgaagaattagcagagaaaaataaagcttacgtatggcacccatttacacaaatgaaagattatttagaagaagatcctgtcattattgaacgtggagagggaagaaagctatacgatgtaaatggtaatgaatattgggatggtgtttcatctatatggttaaatgttcacggacatcaagtaccggaattagatgaagcaattcgtgagcaattaaataaaattgctcattctactatgttaggacttgctaatgttccatctattttattagcagaaaaaattattgaggttgtaccagatggattgaagaaggtattctattctgattcaggttctaccgctgttgaaattgcaattaagatggctttccaatattggcagcataaagggaaaccaaagaaacaaagattcgttacattaaaagaagcatatcacggtgatacaattggagctgtttcggtaggagcaatagacttgtttcaccaagtgtatagttcgctcttatttgatgcgattaaaatgccgtatccatatacatatcgttctccttacggaaataataaggaggaaattgtaaaaagccatttagaagaaatggaagaattgttgaaagaaaagcatgaagaagtagctgccatcattgtagagccattaatgcaaggtgctggcgggatgattacaatgccaaaaggatatttaaaaggactgcgcgatttatgtactaagtacaatgtattatttattacagatgaggtagcgactggatttgggcgtactgggaaaatgtttgcatgtgaacatgaaaatgtgacgccagacattttaactgctgggaaaggtttaacaggtggatatttaccaattgcagttacggtaacgacggatgaaatatataatgccttcttaggagaatatgaagaacaaaaaacatttttccatggacatagctacacaggcaatccgttagggtgtgccgtagcaatcgcgaatctagaactatatgaaaaaacaaatttaatagaagaagtggcacgtaaaacggattatgtggcagcgcaattagaaaagctctttgcgtataaacatgtaggtgatattcgtcagtgcggattaatggttggtattgagcttgtgaagaataaggaaacgaaagaagcgttcgactggacagaaagagtcggtgttcaagtatgtaaacgctcaagagagctgggtatgattttgcgcccgctcggcaacacgattgtatttatgcctcctcttgcttctacaattgatgagattgacgatatgttacgtattttatataaagcaatctcggatgttacggagggagaataatgagcggtttttttataacagcaacagatactgaagttggaaaaactgtagttacaggtgcattagcaggtgtatttagagaacttgggtataacgtaggggtgtataaaccgttgcaaagtgggcatgttgcatcaaaccctgagggagatgcggcaaggttaaaagcattatcaggtgtaccgacacaagaaaatgaaatttgcccttattctattgaagaaccacttgctccgagacttgccatgaaaagagctggaagagtagtaaagttaaaagaaattactgattactataatgaactattaaaagagtttaatagcttatttgtagaaggggcaggtgggcttgctgtcccatatacagaagatgctttagtaattgattttgcaaaagaattacagttgcctcttattgtagtagctcgtcctacattaggaacagtaaatcatacagtgttaacgattgcttacgcaaaggcgcatggcttaaccgtagcgggtgtcattttgtcaggttgcaaagaatgtgaaatggaaagagtgcaagaaaataaagagatgattgaagagctgagcggggtaccagttttaggattattaccattctttgaaggtgagtttacgaaagaagaagtattagaatctgcaaaagaacatattatgatttcaaaattagaggagtttatccaaaatgaatcaaacgtggcgggcgcaccttcaatctaaattacaacaattacatgagcaagggcagtatcgtgatttgcatgtaacagagaaggcagaagagacttggcttattcgagataaaaaaaagatgttaaatttagcgtcaaataattatttagggttagctggagatgaaaggttaaaagaagctgctattgcctgtacaaaaagatatggaactggagcgactgcctctcgtctcgttgtaggaaatcatccattatatgaagaggttgagagaagcatatgtgactggaaaggtactgaaagagctttaattgtaaatagtgggtatacggcaaatataggtgccatatcttctttggcctctcggcacgatattgtttttagtgataagttaaatcatgcaagtattgttgatggaatcctattaagcggggcagagcataaaaggtatcgtcataatgatttggatcatttagagaagctgttgaaaatggcttcgcctgaaaaaaggaaattaatcgtaacagataccgtttttagtatggatggtgatactgtgtatttaagagatttagtacagctgaaagagaaatacggggcaatcattatagtcgatgaagcacatgcgagtggaatatatggaatcggcggagctgggttatctcatatagaaaaaaatcttgctcaaaaaattgatatacatatggggacgtttagcaaggctttagggtgttatggtgcgtatttgacaggtgatgaaatttatatagagtatttacaaaatatgatgagaagctttatttttactacagctttaccaccaagtacgttaggagcagtgcaaaaagcaattgaaattgtaaaagaagataacgaaagaagagagaaccttatagcaaacggagaatacttcagaactaaattaagggatgctggttttgatattgggaatagttcaactcatattgtaccgattgtagtcggttcaaatgaacatgctttacgatttagtaaaaggttgcaagaggcagggattgcggccattgcaattcgtccgccaactgtgccggttcatagttctcgaattcgctttgcagttacatcgcaacatacaatagctgatttaaaatgggctattgatcgaattattcacattgcgaaagaagaggagattttcgtatgaacgagctaaagattatttttatccccggatggggaatggaagagaatatttgggatttagtacttccgtattttaaaggatatcctgttgaatgcatagattggcataatgtgaaagaacgaagtgaatttgcggaacgaattatagatgtagcgcataacgacaacgtaattttagttggatggtcactaggagcgttagcagcagttgaagcttataaaaagattcaggcaaaaggcatcgtattaattggtgggaccgctaaatttacaaatacgagtgactatagtaatggatggaatgctttgcatgtagaacggctgaaaaggaatttggtgagaaggaaagaagatacgctcaagcggttttatgaaaatatgtttacgaaagatgagctaaaagagaacaaaaattttgaagacattgtagaccattttaaaggtgattctattcagtctttacaactaggtttggattatttaatagaaacagatatgagagaagaactaaaagaaattaaagtacctatactacttatccacggagaacaggatgtaatatgcccattgtctgcggcacgtagtatgacggagaatagcagcagcgagctgaaagtagtaagtgaagcagggcatgcattatgtgtaacgaattttgaatattgcgcaaatgagataattcaatttgtagaggggatacgacatgatcaacaaaacgttactacaaaaacggtttaatggggcagccgtatcttacgatcgatatgcaaatgtacaaaaaaagatggcacattcattactttcaatcttaaaggaacgatatagtgaaacggcatcaatacgtattttagaactgggatgcgggacggggtatgtaacagaacaattatcaaagttatttccgaaagcacatattacagcagttgattttgctgaaagtatgattgcgattgcgcaaactagacaaaatgtaaaaaatgtaacgtttcactgtgaagatattgagcaattacgattagaagaatcatatgatgtcattatttcaaatgctacatttcaatggttaaataatttacaacaagtgttaagaaatttatttcaacatttttctatagatgggatattactcttttcaacgtttggacatgaaacatttcaagaattgcatgcttcgttccaacgtgcgaaagaagaaagaaatataaaaaatgaaatatcgattggtcaacgtttttattcaaaagatcagttgcttcatatatgtaagatagaaacaggggatgtgcatgtttctgaaacatgttacatagagagttttacagaagttaaggagtttctgcattctattcgaaaagtaggagcaactaatagcaatgaaggatcatattgtcaaagtccctcactctttcgtgcgatgctacgcatatacgaaagagacttcacgggaaatgaagggataatggcaacgtatcatgctttatttatacatataacaaaagaggggaagagatgaaatgaaacaagtacaaacaaaaagggattggaaaaaacttgcatacgacgtagtggaagagaaaatgattacgaaagaagatgcaatagcgatattagaagctgatgatacagaagttttagaaattatgaatgcagcttacattattcgccatcatcactttggtaagaaagtaaaattgaatatgattattaatacgaaatctggattatgtcctgaagattgtggatattgctcacagtctattatttcagaagcaccgattgataaatatgcatggttaacgcaggagaagattgtagaaggggcacatgaagcaatacgccgtaaagcaggtacatattgtattgtagcgtctggtcgtcgtccgacggataaagaggtaaatcacgtaattggagcagttaaggaaattcgtgaaacgacagacttgaagatttgttgttgtttaggtttcttaaatgaagatcaagcaggacgtttagcggaagcaggcgtgcaccgttataaccacaacttaaatacacatgcaaataattacgatagcatttgttcaactcatacgtatgatgatcgtgttgatacagttcaaaaagcaaaacaagctggtatttcaccatgctctggagcgatttttggcatgggagaaacaattgaagagcgtgctgaaattgcatttgaattacaacgtatagatgcagattctatcccttgtaatttccttgttgctgtaaaggggacacctcttgaagggcaaaaagagttaacgccagtagaatgtttaaaagtacttgcaatgatgcgttttgtaaacccaacaaaagaaattcgtatttcaggaggacgtgaaatcaatttacgttctgtacagccaatcggtttatttgcagcaaattctatttttgtcggggactacttaacgacagctggacaagagccgactgcggactggggtatgattgcagatttaggatttgagattgaagaatgtgcattataagatagatgaaaaagcaaacttgtaaaagagtttgcttttttgtaaataaaatgtaataaatagttgtgaacgcttgatactattggtttttgaacgaaaaaaagaatttttgtggacgaattttccaagccctagttgtacatagtaaatatgtaatttatattgggttggaggattttacatgtacaaatacatattagcgattatgacttgtttaattttaataaaagcaataagttctgatccagttaaggctaccgaaaatcctgaacaaaaagagatgcaacaaagaatcgaacaacactttcgaacgaaagctgaacattttggattgaaaacggaaggaaaagatttaaaggaagttagaaaagaaattactattatagaagaagcgaaaaaaagagagaatgtatggagaacagcgcaagctcttcatataaaaacagaaggaaaaacgatgaatgaattaataaaagatgtacaaaaaaaggtgaaaaaataaaaagaggccgcagcctctttttttatgcccattgttttgataagtgagccatttcaattgcagcaacagctgattcatatcctttattaccagctttcgtacctgcgcgttcaatcgcttgttcaattgtttctgtcgttaatacgccgaaaataactgggatgtccatttgtagtgataaagacgcaacaccttttgctacctcattacaaacgtaatcgtagtgagttgtagcacctcggattacagtacctaatgtaataacagcatcatactttccgctactagccatctttttagcgattaaaggaatttcaaatgcaccaggaacccaagcaacatcaatatcactttcttctacaccgtgacgctttaatccgtctaaagctccgccaagtaacttacttgtaataaattcgttaaaacgtccaacaacaactccaacttttaatcctgtaccaactaaatgaccttcgaataccataataaatctctcctttaattataagtttagtaagtgtcctaatttatttactttcgtttgtaaatacgatttattctcttcttttgccggcatttgcaacggtacacgctcgactacttctaaatcgtaaccttgtaagccagcaatttttcttgggttattcgttaataatcgtaagctttgtaaacctaaatcttttaatatttgagcaccgataccgtaatcacgaagatcagcagggaagccgagtttttcatttgcttctacagtatcgaatccttcttcttgtaatttataagcgcgaagcttattaagaagcccaatgcctcttccttcttgtctcatataaagaagaacaccttttccttcacgctcaatttgagcaagtgctgcatggagttgtggtccgcaatcgcagcgatgtgaaccgaatacatctcctgttaagcattcagaatgaacacgtacaagtaccggttcacctgttgaaatatcaccttttacaagtgcgatatgttctttcgtatctaatgagttagaatagccaattgcgtggaaagtaccgaaatctgtaggtaatgtaatttccacttctctcgtcacaagtgtttcatgatggcggcgataagcaattaaatcttctattgtaatcaattttatatcaaattgttttgcacattctattaaatcaggtacacgtgccatcgtgccgtcctcatttataatttcgcaaataactccagctggttcggcaccgcatagctttgctaaatcaacagcagcttctgtatgacctgcacgacgcaggacaccgccttctttcgcaattaatggaaagatatgtccaggtcgattgaaatcagcgccttttgatgcggggtttaacaattcttgtatcgtagttgcacgttcgtgagcgctaatccctgttgttgtagaaacatggtcaatgctcactgtaaacgcagtatgatgtgaatctgtattatgagataccattggttctaattgtagacgttccgcgtaccctgctgtaatcggtacacaaacgagaccacggccatgtgtaatcataaaattaattgtttctggtgtaatgtactctgctaaagcaataaaatcgccttcattttctcggttttcatcatcacatacgataacgactttaccttgttttaaatcttctagagcttcttcaatacgatgaaacattgtgcttcccccttatagaaatccgttttcttgtaaaaagctttcagtcattgaacctactcgttttgtaggtttagtaataaagcgttcgatatatttaccaatcatgtcacactcaatgtttacgatatctccggcatttttttctccaatgacagattcgcttactgtgtgcgggatgagtgaaatcgttatggaagattcgtctatagcaaatatcgttaaactcgttccatcaacagcaatggaccctttctgcaaacaatagcgcagcagttcatcagaaattgctattttgtaatagacggcattgtaatgttgttttttatttaaaatcgttccgatgccatcaatatgtcctgaaacgaaatgtccaccgaatcgtccgtttgcagccattgctcgttctaaatttactttagagtgtggtttaagtatacgaagtgatgtcgactgcatcgtttcgggcattgcatcaactgtaaatgaagtagttgtaaagtttgttacagttaagcaaataccgttaaccgcgatactatcacctaagtgaacatctgataaaattttctttgcatgaatcgttaatttcatcgcttctccactttgttgcatgtttgctatcgttcctaattcttctacaattcctgtaaacatttcgtcacctcgtttcgggcattcgcaacgatttttatatcatcaccaatttgtttcatctcttgaattttcaaggaaagcgcatcttgtaattttgaaaaaccatttcctccaaataaagtaggagcatctttcccaccaattaatttcgggcttatataggttacaatttcattaaaattgtttgtttttaagaaacttgcatgaatcgattggccaccttcaacgaatagagaaagaatttgtttctctccaagaaaggaaagaaggtcctcgatttctatatgcttcgtttccatttggaatatagctatatttttagattcataagaagatatcttctctttctttacatccttaccgacaataatccatgtcggtgctaaaccatctgttataacatgagaagatggtggcgttcgtaaatgggtatctaaaacaacgcgaataggatgtttcccaccatttggaattcttgttgttaaatgaggattatcagctataactgtattcactccaacaagaattgcatcatgtgtatggcgatattggtgaacatcagcacgtgcttcttcacctgtaatccacttactttcaccagttacagttgctgtttttccatctaagctcagcgctgttttgattgttacaaaagggcgtttcgttttcatgtagtgaaaaaagtagcgatttaataaaactgcttctgcttcaagaacaccagtagttacttcaattctagcttcctctaatcttctttttccgttaccagaaacgagcggattacaatcgagagtagcaattacaacacgcttaactcctttttcgatgagcaattcacagcaaggtggtgtttttccaaagtggctacacggttccagtgttacataaacggtagcgtctttggcgttctgaccagccatttgaagggcatgaacttctgcgtgttcttcaccagctcgtaaatgagcgcccataccaacgatgtttccatcttttacaacaacagcaccaaccataggatttggacttgtttgtcctgatgttccttctgctaactgcagggcaatcctcatatattcttgatctgtcattttcttcacctctccaaaaaaaatcaaaaaaccccaaggatttaatatccttggggtttgggagacgtgatttctagaaatatagtttgaatacgaaagcataggaaagaaacctaacgataattgatatttctgcataaggaaaaaacctagcaaaatatcgaatttttaaacgctagttgtctctttttatttcagtataaaaaataagtatagaaaattaaacatatataaagaatcaaaatgaatctttaaaaatatgcatactgaaataaaagtgtattcactatataaaaaactagaaacatatccttctcccatccagactatactgtcggccctagagtttcactagatccaccgttttcgagttgaaaacgggtcacggacttagaagttttcacttcatcaccgccggttgggaatttcacccgaccccgaaggatgctgtttgctcaaattatagcacaaaaaaaataaaaggctagtaaaaaatattcgaatgtgaagaattgtgtgaaaatatatgcaggctggaatggaaataaaagtattagaaatgttgtaaagagaagggatataacggagttgctaaaaagaaaaaacatgcacaaaaaaatgtgcatgtcacatgtaaaattattctgcctctggtgctctaacaacagactcgaatttacctttatgcgaagcgtcgcaataaggcatattttttgataaaccacaacggcataaagaaaatgccggttttgctgggaatgcattcccttgtgagtcgactaattccacgtcccctgtaacgcgaaaagagccattatcatttactttaatttgtacttttgccaacgttatccctccttcccaaacgcttaatttcatcatataatcaagggaagtgcttggcaatataaagtgaaactttaattagtgggggaggcatcccccactaattattagttgaaccaatcgggcttttaggggcagttaatctcctacctaacttctttgtttcagccgaattttgaggtgggagttttactgcccgcaaatagcggagaaaaaagagcactttgtttgagaaagaagagagtgttataatagttttcataactgactagagtaaggtgacgagagatggataaacaattacatacattacgaaacattgcaaatgagcgcacgtgggcatcatttttgaatgataatcatccatatagtttgttacattggtccattgcaggtgtagggcaagaggcaaaggatgtttggttactgcaagatgaagtaacatttcaaacgacagaattcccaacgttagatgatgcaatgcaatggatttctgaaaatatggaacaagttacagacgttttagcgcaataaaaaacaggcttatgcaagcctgttttttgtttctttcacatatgtgtttaaaaattgatcgacggctgcttcgtactcttctttattttcgttataagagcaagcgtgtgcaccgtgttctgcaatataaagctgcttattattttctttcgcttcatataacgcttttgtcatatcagctaaaatatagtcgtcatctttactatgaataaagagaacgggattgttaatgttttttatacagtcgattggtgaaacttcacgaattgtataaccgtcacgaactttcaaaaatgcgtttgctaaaggtaataaaggccattttggtaaatggaattcaacctttaaacggtgctgtaattgtccgtgaaaatcagagaaaggacaatctgcaatatagaaatcagcaccatcttctacaagtcctgcgtattgaagaagtgttgcagctcccatagattcaccatgaataccaagtgtaatattggtgccaaaacggttttttagccagtcaactacggattttaaatcatgtttttcatagtatccatagcttgttgtttttccgccagttttaccatgacgacgatgatcgtaaatgaggacgttatatcctctttttaagaataagtttgcatattttacagagtttattttatttacagttacaccgtggcaaaaaaccataaacttattggtggaatgaccagcaggaatgtaatatccgtgaaggtcgtatccaaattgtgaagggatatgaatttcttctttatgaagagcatcaaaatcctctatacgaaaatgttttttcgtttctctttcgagtacttcttcctctgtttttttctttaagtacatcactttatttgtaaagaaaatcccaagggcagttattgcacctagtatagtaaacagtgctgcaaaaaaacgtttcatactttacctcatcctccaaataccgttacatgtgatacacttatattgtatcacaatgatataaaaggggagaaataggaaatgctgcatatacaaaaaattacgccagcgatgaaagaaacaatccgaatgttcatgtgtgagaactggggaagttcattgatggtttcacgtggtaagggacatcagttagaagagttgccaggatttgttgcgctctcagatgacagaataatcggaattataacgtatgaagtgaccagaaatatgtgcgaaattgtatcgctagatagctttgaagaaagaaaaggaatagggacgaaacttgtggattgtgtattacaagttgcagaaggagaacggtgcagacaggtttggcttattacaactaatgataatatgaatgcgttacgattttaccaaaaacgtaattttgtaatgactaatttatatgtgaatgcggtagaggaggcacgaaaaataaagaaagaaattccacgtattggatatgataatatcccgattttacatgaaattcagttggagtatcgtttagtgaaatgatgtaacaattttcagaaatatgagttgttaatcttgacggatagtttaatttaggttaccgtaaaattgtaatctattaccatattaaggggtgacgatgtggcaactatacgtgatgttgcaaaattggcaggtgtttcagtcgcaaccgtttcacgagttattaatgaaaaaggatacgttcatgaggacacagtaaaacaagtaaaggaagcaattgaagaattacgttataggccaaacagtgcagcgaagccactatttaaagaggattcaacgataattgcattacttgtagataatttatgtaaccaatcaaacatcactttgctacattgtattgaggaaatagcatataaagaaggttatcaaatcattatttgtaatatagagaataaagatagatacatacatatgctgaagcaaaataacattgcaggtgttattttgacaagagcagtttttaaaagtgtaggaaaaattccatttccgtttgttgtgatcgatgagcaacaatcacatggaaattattatgaaagtggacagagagctgtttctttattaaaagagaaagggtgtcactttcttgcatatttcggtgagggagaagaaagtgaagaaatggaagatcatatagcagggtttttagacgctgtttgggatgaaggaatctcttatcgagaagaatgtgtacaagggtatacaaataaacaatttattacattattgcaaaacaatccgtatgtagatggaattgtagcctcaagtgatcagattgctattgatttaattcggtcagcgagatttctaaatatacatataccagataaattaaaaattgttggaccgaatgggagcatagagtgtgaatggagaggttcatcactaccgacaatagaaagctatgtcagagataatggaaaagtagcttttcaacaattaaaaggaaaaataaaaaagtaaaaggtgcgttttatacgcacctttttataatgtaattgcggcaataaagccaaatataagtaacggtatattgtaatgtagaaaagtgggtacacatgtatcccatatatgatggtgctgaccatcagcatttaaaccggatgttggtccaagtgtactatccgatgctggagatcctgcgtcacctagcgctccggctgtaccgataattgcaattgtggccattggactaaatccaagctgaatgcaaagaggtacaaaaatggttgttaagatagggatggttgaaaaggatgaaccaattcccatcgtaacgagaagtccaataacgagcataagaaatgcagcgagtggtttgttatttccgattatatgtgcactcgtttgcactagagattcaacatgtcctgtttttcgaagaacagcgccgaatccggcggcagcaatcataacaaagccaataaaggacatcatacgcattccgcttgttaatatcgcatctgcttctttaagtggtagactgccactaactgataagacgataatacctgctaaagcaccaaaaatcattgattctgttgttaattgaacagttaatgtagcaatgatagataataacccgaaagtaatgctacgttttgtatagggaacgatttcattttcggtagtatgaatttgttctgtttcatacgtacgaggttttcggtacgtaatgaataccgctacacataatccaataatcataccgattgctggaatagtcattgcttttggaataagtgcgacatcaaatgtaagaccgctttgcgcagcgttggtttgcaatacgtcatgataaatttttccgaaccctgcagggatccacatataaggagtaatcaatccaaatgtaataatacatgtgacaagtctgcgatccactttcagctcagttaatacttttaaaagtgctggaattaagatggggatgaaagcaatgtgaacaggaatcacattttgtgagaaacaagccatcattaaaataatgaataaaataagtaccttagaataaacttgttttttcgtgtcttgttcattgccaatccattttaatgcagtttgaatcatagcatctggaagtcctgttttggaaagggaaatagcgaaaccaccaagcattgcataacttaaagcgattggagcactgtttccaagaccagttgtaaaagtgttaatcgtttctgaaataccgagtccgccgataagtccgcctgttaaagctccaacaatgatggcgacaatgacctggacacgtaacaaactaagcaatagcataattgctactgcgacgagtacagcgttcataataaatgtaatctccctaaatttttattctgttaagacaagtacatatgaaacattttgctatgtttatacatacttgcgacatattattataaaatgttttctatgaaatgtaaaagagccttttgtgactaatgctgaaaagctagctcttgtttaattgattgcaaagaattggcgaataattctggttcttctagatcaggagaatgtgctgagtttgggaaccaaatcatcttttttataggcgcttcaataatatcgcaatattcctgaacgagtgcataaggggtttgataatcatagcgaccagaacaaaaataaactggaatagataaacttgagatagaagaaaagaaatcgattgtcagcatttcttcccataaaacgccagattttaaatttcctgcgagaaacttgaaccaatctaatagcgtgtactcaggagaaaagaaaccttttcgtatgaaagaaaaggaagatccattttggattgcgcctccgaatgtgccaagccactttctttgaataatgagacgtctcgtatctaaaaatggtggctttcctaattttaaaagggaagctaatgcttttttatgattatgtttttttgcagaacgaattaaatgttgatatagcaattcttcattttgtttcatatgtacaatttgcccaataccgatgtaagcctcaatatactttggatattgatgtgctatgttaagcccaatgatacttccccaagaatgaccagcgagaaatagtttttgtttgttgaaccttttaagtacatattgaatcacttcttttgcatcggaaacgaattgttcgattgtgaaatttgctccgaaatcttttattgaaaaggatttaccagccccgcgctgatcccaattaataacaataaattgcttctctaattctttttgaaaatggcgaataaatccgatttgtgccatcccaggtccgccgtgacagcataataaaataggttgctctacgttttgtccacgcataaggagagtttgttttcgattattaatcataacgctttctatcgtagcgatactgttaggaatgagttgtttgttttcattatagaactgaggggtgtagctacgaaaaagcatattgaaaacctccttttgtgaaatcgtatgaatcgcacaggctattcattttgcatatactgttagaaaatcattgtaacataccatactagtgtcatttcaacacgggaggagggaaattgtgacgattggagaaattatagatggtttaaatagacgtgaacccatcgctattatagcaaaacgtcttgaaataagcccgtatacattatcgaagaaattaagattgattggatacgaatatgatggagagcagaagaaacgtatttttgtaggagatggagaagaaccacgtcacttacaactccaagaagcgaccgcccttcaatatgagaaaacagattatcaattgttaatttatgagcaattacaaagcatttatgaattattaagaaaaagagaagaagtaattgtaccaattatgagtaaaagtgcagagaagaagagacgaaccttttctattaatacagaaatattatcacaattggaccttatatcagaatcgaaaggaattcaaaaatctaaacttgtagaagaggcgttgcaccaatttttacagcaatatgaagttgacaaaacatcacattttgataactaaagaaaaggatactatgttcattggaagaacgagtatcctttttatgatgtatattacgtataaaatagaggatcagtataaatcctttatggcgtgaaaaatgaaatttattattagagaaacacttaatttactttttgaattcttccatcaataactggctgaattggttcttttaattgttttacgtaatcgactaacgcttcaaagtcgtttggaccagtttctgcatttttaccatttttaaatgatacgaatccgtcaccgccagaagctaagaaggcatttgcaactacgctatacattttagatggagataattcttctccgtttgttaaacgtatatttgtaactttttcaccgtttggtttatttgcatcccacgtatattgaatacctgaaatttgaagcattcttgttgttcctttttgccattgctgatttaaaatatcgcgaatgtcttgacctgttaaatctactttaattaattgatttccaaaaggttgaatgccgtataactcaccccacgtaatatcaccagcatctaagtcattacgaatgccaccaggattcatgagggcgatttgagtttgcatcgtttgacgctgagcatcggcaactaaatttccaagagtggactcaccagcatcattttgtttacggtcgataggtgctgtagattttccgactacttcatttacaagtggtgcaattttttctttatattgatctagttttttctttacttgtttatcaggttctacaccttcatgatagggtgtaacaacttcagcttttttctttacaatatcctttgttttacgatcaattgttacatccacgtctgagaaagccgttccgtatgaatttgcttggacaattagtttattatttactgtaccatttacatacgtatgactatgtccaccgaaaataacatcaacttctgggtctgtttcatttgcaattcgagtaagatcgccatttgttaccccagactcatcggttgttccaccgacatgagcaagaacgacgatagatttaacgccgagacgttttaattgttgtgttgatttattaattgcttctacttcatcagtaatttgtacattgttaagcatcgtaggcataacgacatttggtgtatcagttgtaacaaccccaatgaatcctacaggaacaccatctaccatttttacagtaaacggtggtaaaaataagcggccagttgatttgttgtagaagttagcagctacataggggaagttagcccctttgaaattccctgttttttcatgatatccaccgtaaatgaggcgttgcatttcatcaataccttcatcaaattcatggtttccgattgtaccgacatcaaattttaagtcatttaaaaattcaattgtcggttcatcttgtaataatgctgaaactggtggactagctccgacgatatcaccagcatgtacgagaagtgtattagggttttgttttttacgttcttttaaataagtagctaagtaatcagcgccaccagcttctttattattgatttttttaacagtatctagttgtccatggaaatcattaataccaagcatttgtacgtctatgtagcggttttgttcagctggattctgagatgggggagcggcaaatacgcttgaaaaagtaatggtgcttaaaacagcaacggcaggaataatttttttccacataatataattctcctttttttataatctgacatcatacgacataattttaatagattcataggattatagctacataaaaatttagtcttttcgaaaaattaacatatttacaaaaagtgaataatagagtgaagacctttttttattgtcgatttcatcgtgtatctactataatggagaaaaaagtaaaaggtgagtagcatgaagaaaaagaaacaaagacaaatacaaagacaatcacaagtgaatcaaccgaagaaagaaacacttacattaggcgatcaattaaatgattcactcatgcaacaattaaagagtaagaagaaagagttgcaagtgagggaagaggaaaaagaggcagctgaactggaaagaaagcgccaagaacaaaaagaacgtgaaaagaataaatcatttgaagaactgctaagtgaaagtaaccttacttggaaagactttaaataataaaaaatgatcagtggtatttcactgatcattttttgacgagcttgtaagaaaaggggagttagaatgagaaaaattatcgttgttccacatgaaaaccattggagtgaaaaatttcaaatggaggctgaaagattaaaaacagcgatgccagaaacggtgaaaattcatcatattggaagtacgtcagtgcccggactggcagctaaacctattattgatatgatcatggaagtagaaaatatcgaaagagtagatgggtggaatgaacgatttatagagcttggttacatcgtaaaaggggaaaatggtatttcaagacgccgatattttattcatggaactgaagaaaaacgttcgtatcatttacacgtgtttgaaaaaggaaatccagagattgtaaggcatttagcgtttcgtgattatatgatggctcattgtgaagaagcagaggcatatgcaaccttaaagagagaattagccgaaaagtatacatatgatggcacgttatatacggaagggaaaaatgagtttgtgcgcaatgtggatgaaaaagcgaaagaatggagagaaaataacttaaatgaatgagttcacgttattttttagctatataaaagtgttatgtaaactgtacgtatgttttgacttttgggatgaatcttgttgaaataaagttgtggcttataaaaaatgtaacaatgaaagggagacgactgtgcatattccaacaactacacttcataatggcgtgaaaatgccgatgattggtctaggcgtatataaagcgaaagaaggagacgaagtaaagcaagcagtaaaaacagcgttagaagttggataccgttcgattgatacagcaactgtatatgaaaatgaaagcggtgtcggagaggcgatacgtgaatcaggaattccaagagaagatatatttataacaacaaaagtatggaacgacgatcaaggatatgaggagacactcgaggcgtttgaaaagagtttgaaaaaattacaaatggactatgtagatttatatttaatacattggccggtaagagggaagtatgttgatacgtaccgagctttggagaaattgtatgaagaaggtaaagtgcgcgcgattggtgtttctaattttcataaacatcatttagaactattattaccaaattgcaaagtgaagccgatggtaaaccaagtggaacttcatccgatgttgacgcaatttgagttgcgcaattattgtcaagatgagcaaattcaaatggaagcatggagtccgttaatgaggggcggagaagtattccagcatccaatcattcaggctattgctaacaaatatgaaaaaacacctgcacaagttatattaaggtgggatattcaaatcggaattgttacaattcctaaatctgttacaccatctcgtattgaagaaaactttactatttttgattttgcactaactgaagaagagatacgtcaaattaacacgttgaatcgtgatttacatgtaggaacgaatcctgataaatatgatacgttataaaaaagactgtctcctaatactggagacagtcttctgtttatcggtaattcgatatttttaacgatgcaaagcatatgtgtcatatttaacaatcttttgaagttgtatatattcttctttcgttaaaggtaactgttggctagctcgtatattttcctgtaattgttgaagcgagcttgcaccaggtataacagctgcaacagtcttattatgtaagcaatattgaatagctgttcctgttaaagagcgttctccaatcgtttcttttacactcgctagagttgtatgtaattcatcgtaagaataagagagataatccttttcctttactctttctatttttattgcattgttgtcagttaaaattccttttgcaagtggcccgcgggcaatgacgctaatttggtgttcattcagaaggggaaaccattcttctggacgacgatttaaaaggctatattccattagtacactaacgatgtttgagcgttttgcatactcacgaacgacatttgggcgtatagaagaaataccataatggcgaataataccttcctttttcaattcttcaaaagcttcaattgtttcatctattggatcttcaatcgttcccccatgaagttggtaaagatcaatataatcagtttgaagtctacgtaaactttcctttacttcagtttttatgtaagctttagaaggatcccaagaccagccatttttttcttctgtccaacgatttccaactttcgttgtaagaacaatttggtctcttcttcccttcaaggcttttccaacaaattcttcatttaatccgtaatcatataaatctgctgtatcaaaaaaattaattcctaaatcgattgcttcatcgataatatgcatagcttctgtttcagatgtaccgagagacatacagccaaggcccatttctgtaacaaacaaatctgagtttcctaattgacgttttttcataggtcaacctccttacctttattgtacgagagggaaaagaggttgacaaacgtttacttttcgtttcgcattaactgcccgtaaaagcatgattaatgtttcactttatttgctgtaatccactcttgtacagttgcatactctttgctatattgctttagcttatggcgaatttgccatgcttttccgactaaagtgacgcgatttggtaaaatataaactttcatttctatcacgctcctttcaatgtggtaaaatgtatgaggaaagaataggaaatagaacagggagatgaagtagtatgagtaatcttgcagagagaacagtaaaaactgagccgatttttgatggtagagttataaaagttcgtgttgatgatgtagtattaccaaatggagcaatgagtaaacgtgaaattgtaaatcaccctggtgcagttgctattattgctattactgatgaggggaaaattgtgcttgttgagcagtatcgtaaagcgcttgaaaaggcgattatagaaattccggctggtaagttagaacctggtgaaaaacctgaggtaacagcagttcgtgaattagaagaggaaacaggatatgtatgtgaaaatatggagctcattacttctttctatacatctccaggattcgcagatgaaattttatatgtatataaagcgacaggtttgacaaaaaaagaaaataaagctgagttagatgaagatgagtttgtggaattaatggaagtatcgttagaagaagcgattactcttatgaaagatcttcgtattcatgatgcgaagacgatgtttgcagtacaatatttacaactacaaaaataaacactcgccaaaggcgagtgttttttaattgatttttgcatatacacgtgcatcacgtaagctaccatctggtgctaggaaatcattttccattgtaccttctagaatgaattctagacgttctgctaagctacatgcatttatatttgttgcatcagtacgaatttcaattcttctagcgcctagtttatcaaaggcgaactgaattgcacctttaacagcttcggtcatatagccttgttttgtataggcactatgtagccagaagtgaagtgaaaactttggaatatcccagttttcaggctgtagtgtaattgctccgatgaatgtaccagatactttatcgtataagtgaaaatcaagtgtttcacgaagtaaaaactgtccgtgagcttcgcgaacaatttcttcagcactctcttctgtttcagcgttaattggtatccacggtactaagtcttctagagaagcttggattgcttcatatacttctgcaccatcacctggaaatggtttacgaacttgcaagcgttcagtttgaaataatgttggaaaatctaataataatggtttcaagagaaatccctcctattctctactttttagtttagcaaagtagagcggaatttcaatgttaattcgtcatacttttttctttctttcatacatttttaataagagtgtgaacggagggaaggaaaatgtggcgaaaaaattggcaagaccgtgtaatgtctcacatacaggaaaactcttcattatatatatttaacgccgttttattattgatgggagtaatattcggagctattctggtgaatagtttacaaatcaatcaaaaacaagatttatcattttatttacaacgtttttttggacaagtctctaaaggagaatttgccattgcgggcgaaatgtttcgagaaagttacttttcgcaattaaaatacatcggatttatttggattttagggatttcaattattggattaccacttatttttattttattatttgtaaaaggagttgtcgttggatttacagttggttttttagtaagtcagcatggatggaatggattattattagcatttgtatccgttttgccacaaaatttaattatcattccagtctttctcgttatgacaactattgctgcaagtttttctttacggatgattaggcatcaatttattagaaaaataaccgagccactattaccattattaatccgttatacatgcttctttctcgtaattggagtggtgttagcacttgcttctagtgtggaggcttacgcatcaccagttttaatgaaagaagtcgttgaggctattaataaaaaataaatactttttgagaataattatcaatttgtttttattgtttttttcttttgacagaagcccttcttctgatataatggtgtaagagtggcgaggagggagtagtaccgaatggaagaaagaattgaacgaattaagaagcaattacatgcagcgagctacaaattaacaccgcaacgtgaagcaacagttcgtgtgctgctagaaaatgaagaagatcatttaagcgcagaagatgtttacctccttgtaaaagaaaagtcgccagagatcggattagcaaccgtctatcgaactttagaactattatctgagttaaaagttgtcgataagattaacttcggagacggtgtttcacgctatgacttacgccaagaaggtgcgcagcgtttccaccatcatttgatttgtacacaatgtggtgctgtacaagaaatacaagaagatttacttggtgaagtggaaaggaaagtagaacgagactggagctttaaggtgaaagatcatcgtttaacattccatgggatttgtaaaaattgtcaagaaaatgaaacggatgaaaaataaccttttcctatttatctaggaagaggttttttatttgaataaggtataaattggtgaaagcttggcatatgttgtaataacttatattttggaggaatttacaatgcgccgagctttaaaattaacttttgatggaataaaagtatttttattatttacaagttgtacgattttgttttatttcgctatactatggataaatgaagaatatgaaagctatcatcgttatgaaaaacctaaagaagagactgtagaaaaagtatcagggaatgaagaaccggcaaaggatgctttcgtaaatagaatgatgtttttctatgaaaatggggagtagtgtagagtggaagatcaattaaaagattttattcattatatggttgtcgaaaaaggattagcaaagaatacagtagtatcttatgaacgggatttaaaaagctacgtaaagtatttgcaaaatgtggaacagacgaaaacttttcatgaagtgacccgtttacacattgttaattttttgcagtatttaaaagagaacggaaaatcttcgaaaacattggcgcgtcatatcgcatcaattcgttcgttccaccaatttttacttcgtgaacgagcggtagaacacgacccatccgtacatattgaaacgccacaaggggaacggaaattaccaaaagtattatcagttgatgaagtagaggcgttacttcaaacaccaaaaatgacaagtgcttttgggattcgtgataaggcgatgctagagttactgtatgcgacaggacttcgtgtttcagaattgattgcactcaatttagaagatgtacatttaacgatgggatttgttcgttgcatagggaaagggaataaagaaagaattattccactaggaagtttagcaacggaagcgattcaaaagtatattgaaaaaggaagaagagaattaatggggaaaaaagtagtagatgcactctttttaaaccatcatggtaatcgtttatcaagacaaggattttggaaaatattaaaacgattagcgaaagaagcaaatattgaaaaagagcttacacctcatacgttgcgtcactcgtttgctacgcacttattagaaaatggagcagatttacgtgctgtacaagaaatgcttggacatgcagatatttcaacgactcaaatctatacgcacgtttcaaaaactagattaaaagatgtatataaacagtttcatccgagagcatagttactatgctctttttttcatagattaagaggggaagaccgcttcacagaaacttcacaaacatttcgtatattgttttcagcagaagactggaatattacaatgtatttcctctatactaaatagagtataaaggaggaaatgatgatgaaaaaactgattataactttatttatcgcgatgctagcgttggctggctgtaatacaaacaaagaagaaccgaaaaaagaaaagaaacttgaaagtgtaaacgtagcaattcaaacgaatccgaaagaaattaaacctggtgaaaaaacagaagtacaagcacttgttacacaaggaaaagaaagagtaaccgatgccgatgatgtaaagtttgaaatttggaaagatggcgacgagaagcacgagatgttagatggtaagcataaaggaaaaggtgtttatgcagtagagaaaacatttgaaactgacggagtatatcatattattcctcatacaaatgcacgtgatatgcacgttatgccagaacataaagttgctgtaggaaatgcgaaagtagaagatgcaaaaaaagaaaatagtgaccacagtgcaggacatggagatcataaaagtgacacaatgatccatcttatggctggagacataaaggcaaatgctgaatctacaatgaaagttcatttaaagcaaaaagaagaagcattaactggtgctgaagtacaactagagatttggaaagatggtgttgaaaaacacgaatttattccagcgaaagaagggaataaaggagagtatgaaacgaaacatactttcaaagagaacggtgcttacaaagtgaaagtacatgtaagaaaaggcgaattgcatgaacataaagaagaaacaatagaagtaaaataaaaagtagctctttagagctactttttatttttaatatgaagaaataaatcataaaaaaattagcacttcgttgcagaatggattacaatagaagtgtgaagaaaatgagaaattctacgaaaatgtattaaaaagaaagcgtaaacatgttatgatatcagtatcagatgtctgacatctgacttagaaaaaactagaaatgtttttgaatcgtttcaagtaaacgaaataggttagaaaatgatttaaagaagtactgtttgacaatgagaattctttttgataacagtttcactttatagcgttttgaacatactacaagaagtagaactgaacttataggagggcgcagttatgaataaatataaacgtatattcctagtcgtaatggactctgtgggaatcggtgaagcaccagatgctgagcaatttggtgatttaggatctgacacaattggtcacattgctgaacatatgaatgggttacaaatgcctaacatggtgaaattaggtcttggtaacattcgagaaatgaaaggtatctctaaagtagagaaaccacttggatattacacaaaaatgcaagagaaatctactggtaaagatacaatgacaggtcactgggaaatcatgggcctttacattgatacaccattccaagtgttcccggaaggattcccgaaagaattacttgatgaattagaagaaaaaacaggccgtaaaattatcggtaataagccagcttctggaactgagattcttgatgaacttggtcaagagcaaatggaaacaggctctttaatcgtttatacttctgctgatagcgtattgcaaattgcagcacacgaagaagtagtgccacttgatgagttatataaaatctgtaaaattgcacgtgaattaacattagatgagaaatacatggtaggtcgtgttattgctcgtccattcgttggtgaacctggaaactttacacgtacaccaaaccgtcatgactatgcattaaaaccattcggccgtacagtaatgaatgaattaaaagatagtgactacgatgtaattgctatcggtaaaatctctgatatttatgatggtgaaggggtaactgaatcacttcgtacgaagtctaacatggatggaatggataagcttgtagatacattaaatatggactttacaggtcttagcttcttaaacttagttgactttgatgcattattcggccatcgccgtgatccacaaggatacggagaagctctgcaagaatatgatgcacgtcttccagaagtattcgcaaaactaaaagaagatgatctattattaattacagcagaccacggtaatgatccaattcaccctggtactgaccatacacgtgaatatgtaccattattggcatatagcccaagcatgaaagaaggcggacaagaattaccacttcgtcaaacatttgctgatattggtgcaacagtagcagaaaacttcggtgtgaaaatgccagaatacggaacaagcttcttaaacgagctaaagaaatagggggataaacaaatgaatcgtgaacttattacaaaatcagcttcatacttaaaagagaaatttcaagagacaccacaagtaggactaatccttggatcaggactaggtgtattagcagacgaaattgagaacgcagtaacagtaccttacagtgaaatccctgaattcccagtatcaactgtagaaggccatgcaggtcaactagtatttggtacacttcaaggtgtaacagtagtagcaatgcaaggacgtttccacttctatgaaggatacgacatgcaaaaagtaacattcccagttcgtgttatgaaagaactaggtgtagaaacagttgttgtaacaaacgcagctggtggtgtaaatacatcatttgagccaggcgatcttatgttaatttcagaccacattaacttcatgggtacgaatccattaatcggaccaaatgattctgaaatgggcgtacgtttccctgatatgtctacgtcatatacggtagaacttcgcgaaatggcgaaacaagttgcagcagacttaaatattaaagtacaagaaggtgtatacgtaggaatgacaggtcctgtatatgaaacacctgctgaaattcgtatgcttcgtacacttggcggagatgcagttggtatgtcaacagtacctgaagtaattgtagcgcgtcatgctggtatgaaagtgttaggtatttcttgtatttcaaatatggcagctggtattttagatcaaccacttcaccacgatgaagtaattgaaacgacagaacgtgttaaagctaacttcttagcattagtaaaagcaatcgtaaaacaaatgaaggggtgacttcacaatgagaatggtggacctaattgcaaaaaaacgtgacggacatgcattaacgacagaagaaattaactttattgttgaaggatatacgaatggtgatattcctgattatcaagtaagttcacttgcaatggcaattttcttccaagatatgaacgatcaagagcgtgccgatttaacgatggcaatggtaaatagcggtgatacaatcgacttatcagctattgaaggtgtaaaagtagataagcattcaacaggtggtgttggtgatacaacgacacttgtattaggtccattagtagccgctttagatgtaccagtagcgaaaatgtctggacgcggtttaggacatactggtggtacaattgataaattagaagcagttccaggattccatgtggaaattgaaaacgatgaattcatgcgtcttgtaaatgaaaacaaaatcgctgttatcggtcaaagtggtaacttaacacctgctgataaaaagctatatgcacttcgtgatgtgacagcaacagtaaactcaattccgcttattgcaagttcgattatgagtaaaaaaattgctgctggtgcagatgcaattgttcttgatgtaaaaactggagcaggtgcatttatgaaaacggatgaagatgcaaaacgtttagcagaagcaatggtacgtatcggtaataacgttggtcgtaacacgatggcagttatttctgatatgagtcaaccactcggtgaagctatcggtaacgcattagaagttcaagaagcaattgatacattacaaggtaaagggccgaaagatttagaagagctatgtttaacacttggaagtcaaatggtgtaccttgctggacaagcttcatctttagaagatgcacgtgaaaagctaattgaagtaatgaacaacggaaaagcgctagaatcatttaaaacgttcttatcagcgcaaggcggcgacgcatctgttgttgatgacccttctaaattgccacaagcacaatttaaaattgaagtggaagcgaaagaagacggatatgtatcagaaatcgttgcagacgaaatcggaacagcagcaatgcttttaggagcaggacgtgcaacgaaagagtctgaaattgatttagcagttggtctaatgctgcgcaaaaaagtaggcgatagagtgcagcaaggtgaatctctcgttacaatttacgcaaaccgcgaaaatgttgaagatgtaaaagcgaaaatttatgagaacatgaagatctctaaagaacacgtagatgcaccaactttagtacacggtatcgtaacgaagtaataaaaaaaagctgaggagatttctccttggctttttttactattttttgtttataataataatgggtgaaattatgattagaatttgtgcagtaacaaaaacagatgaagtattatatgatgtttctctagaagaaacaaagaaagaccatattgtatggtattggctagatttatataagccaacgaaagaagagtatacatatattctgcaagaccattttaagttccatccccttgcaattgaagactgtatagaatatgtacagaggccaaaagttgatttttatgatggatataactttttagtacttcacgcatttggggaagatggactagaaccgcacgaaatcgatttatttattagtgatcgttatattgtttctttccacttttctcataacaatgcaatcgaaagagtatggaaaacacttggagaaaagaagcgtattaaaaatagtcctttacacgtagctcatacaattatcgaccaaattgtagatgactattttgcgcctgtatattacattgaggatcatttaaatgcaattgatgataatttaacgggggagacagcaggaagtgtattagaagaggtatttgatatacgtacagatttatcaaagctaaggcgtacaatcattccgatgcgtgatttattatatcgtattttaaattcgactcgtttttacggtataagcgatcatgaaatttactttaaagatatacatgatcatttgcttaaactaacagaaatgattgaggcaagccgagagttaacagcagatattcgggatagttatttttcattaaactcacatcatatgaataacattatgaaaacattaactgtattctcgactattttcatgccattaacatttattgcgggagtatatggaatgaactttacgcatatgccagagcttggtggacaatatagttattttatttgtctacttattatggcactaattggcggcggaatgatggcctggttttataaaaaaggatggtttaagtaaaaaaacaccgaggatttcctcggtgttttttttaaccaatagcatgtaatacaaacatagctaaaaataagcatgtaatgatatacatagatggtgcgacttctttacgctttccaagagcaacttttaagatagggtaagcaataaatccgaacgcaatgccatcagcgatactatatgtgagcgggatcataacgataattaagaatgctggaaatccttctgaaaagtcattcagaggaatttgttgaatgcttgtaatcatcagaccgccaataataattaagattggtgcaatggcactatcaggaattaatttgacaaatggaagagcaaacagtgatgcaaagaatagcaacccagtaacgatagacgtcagacctgtcttaccacctgcagtaatacctgcggcactttctactgttgaaacggtaggacttgtgccaaatagaccacatgttattgctgaaattgcattggcttggtaagcacgtgggaatttacgatcatcttctaataaaccgtgcagaagtcccatgttctcaaagataagcaccatgcttaaagagaatgttgcaatccaaaatggtaaggaagaaagtttcccaaatgacatagctccaaacacatcaccgtaattagcgaatgagaatgaactacttcccacttgactcgtatccacaagaccaaatagccaggcgataccagttcctattgcaatcgtccataaaaagtttccacgtacgttacgaataaataatacaagtgcaatgataagagtaagtaatgtcgcaagaacgacaggattacttaatttccccattgccacagcagtatttgggttcgaaacgactaaaccacctttttgcaatccgataaacgctaaaaataatccgatgccgacagtaatcgcttcctttaatgactttggaattgatactgatagcacgcgagcgattggtgtaaaagcggcaattgcaaaaataataccagagataaagacagcagccaatgcttcttgccaagttagtccaagcgtatgcacagctgtgtacgtgaagaatgcatttacacccatacccgggacaagaatagcaggtgcatttgcccaaaatgccatgagtagacatccgacaaatgaactaaaaacagttgctaaaattccagcttcaagaggaatgccagcatctgataagattgacgcatttacaatcataatatatacgattgtgaaaaatgacgtaactccagctaatacttcttgttttggtgatgtttcgtgtaaacctaatttaaatgttctttcaagtattcctttcatgttaaaccttctttttcatatccctctcccacccgtgatatctcttatgtaagagctcaccgttctttattatatcagaacatcatgtttttacaacaagtaaaatgataacgtttacttgtaaagagaattcgttataaatacgtaaaaatagcccgtatggatgaaatgatttctaattcacccgattgaatgggaggggctgcttgcgcatgtaaagtagcataagacgtaacctcccgtggtaattgggcagattcttcaacgaatgagaggggaacaggattaatatttaaattatatgtactcgcaatagcacgagctttttctactgcttggtgcagagcttgaatgagagcttgctcataatatttatttggatgagatactcggaaacgtaaaccttttgctacatttgcgccatttgaaacggctatatcatatacttccccagctttttgtacatttaaaacggtaatttcatacaaatgctccacgcggtatccttgtagcaatgctttatcatttacatattcgtattgaggagtaattgtataagaaatcgtttctatatctttatcggcaataccaagctgtttaagtgcatccagcaattgtttggattgcactgcattttcttcttgagcctgttttacatttttatcatctgttcgaatgccaagcgttaatataacaacattcggttttgctttgacaacgccttcgccttgtacagtaatagtagcttctttaccagtattagctgtgcgtacgttgtgtaaataaggattcattccaccctgcattttccatcaccatcctttttatatgtatatgtgtgaacaaaaaagaaatttatatgaaaaaagttacataaatgagaatgttgaggaaagaaagcatgtacaacataggtatttatagattataatatgtgtaaatatgataaaaaagggacgaggctattgaacgaaaaaagagaaacgctgattttagatttatctgcatcatttcgaaaaatgatacgtttattacaaaatgatattaatacacgttttgcagaacatatgccatataatgaattttctgtattacgtgcgttatttttaaagagtccacagatggcttcgcaaattgcgagtgaagtaaacgtaacctccagtcatattacagctgttacagatcgtctcgtacgaaaaggattagtagaaagaaaacgttctaattcagatcgtcgaatcgtgtatttagaaattacagagcacggaagagaagtaactgaaaaacttgaagctgtgcgtaaagaatattataaagagagatttaaaggttggagcgaccaagaaatagaaatggtcttagaactatttggccgcgtattataataaatgaggataggaagcgaaagcattcctatcctttttcttttgaataaaaatattttgaaactccgatactttaattaaaagatcggaggaaagattatgaaatatattgctgcacttaccattttatttggtggttttttctattttcaaacatttacgtacgcagatacgcctatccaagtggtacgaaaagaagtgaagtacattgaaaccgataatacagtcttatattcgaaattatgggttcgttctatgcaaaacgcagtattattccaccatagcgataatattcgtaatcaggacacattacgtaatgtaacaagttcatcgcttgttaaagcgaaacaactattttttcagaaagcagcactctatataccgagactatcgcaatacgtatcaaaaataggaaaagaaaatattcaagtgtactacattgcgattcactataatgtgaaaaaagaaaatgcatatcaattagatggcatgaactattttctacaagtatttgtgaaagagcgtggggaatggaaaattgctgaaagtgtagttgcaccgacagagcaaattgtgcaaaatggtgatggatttgggatgaaagaagagatggtgtatggggataggagagagaatgtgaaataacctctttatttagatcgggatatataataaaaaagcattgctcttgtgcaatgccttttttatttggttcatataagagttaaataattcataacatatttcttttgtcattatataccttttttgtcagcttctatttaatgtcattgttccgtgtttatagtttcacatctatgatgcttttggaaacatgtatccaccaccttaatgcatatttatttccctacaaaagcaaacttcaattttaatagacgtgtaaaaatgaagtaacttatggtagcgaataggaaaaatccaacataataagacagaagtgcatctcgtccgcctaatattctaccaccaagtagtccgaagcatagaacagtgcaaattatgaaccatttttgcaagttaggaaacaatagtatttttccactttgttcgtttggtgtacgtgtgtatagaaaggttgctattgataaaaaggtaatgatgtaagcaaatggtgttaatagtgtccaaggagaaggtacagaaatacgctccgtaggattgtcctgtggtacactagaaagtttattgccatagtcatcaaatgtttctatcgggtggtaatcataagtaatagaaaaatattctaatggtgaaatgatacctatatgttgtaagtactcatgagtatggtgctctatttctcccattgcatctacagaccattgtgtgtgtgaataaatgaatccggaaattaacaatccaaaaccgtatggtaaaaataatagaatgatagttaaaatactttgagaaaatatatgtccagtaagagtcccgataaataaggcgaatgtataaatagcgataagtacaaccgtagcatatagaaagtaactatagaacggagcaaaggtttgatactcattgtgaaacgacatgttctttattccgtacatgctaatccagcaaacaatttgtactgtaataatattcaaaacaccaagccaccattttgttaaaaaaatatcctttcgtttaaaaggcatcgagaatagaaaatcagttgattgattattacgttcccatccaattaaaagacaagcgagtgcaattagagtagctccttgaaagaagacggcaccatcagatgtctgaaaatagtaggagtagtaatatgcatagtcaccaaacttcatttttgatagttttagttgcatttgcgcttcttgataatatttataaggtagttgatataaactagttaaccaaaataatagaattatatattttccttgcttccattgcctcatccataaagctttatgaaacatgtgaatcctcctcaaatgtagtgataaaaatatcttcaagtgacattgttaattcttcaataagtataggttgctctttgtaaaacttctcgagtgttgtagccacatttccctcaattaagattgtatatacttttcctgtttggtttaatattttaatattgcttaagttttctagcttttgaggtaatgaacgttcgtaagctacttgtatttttgcaaatcgtgattttgcatcgtctagtgatgtaatagacgagatagtatggccttttaatataataattgtatctgcaatttgttctacttcatctaaatggtgagtggagatgaaaatggtaatctctttttctgcaacttctccaacgagaaactgtaaaattttccttttcacgataggatcaagtccatttgtcggttcatctaaaatgatatattctgcctttgtagaaacagctaaaatgatggcgagcagtgctttcatgccttttgaatagctacgaattcgtttgtttggtaagttaaaacgttctaacagttcatagaaatgtgtttcatcaaatgcggtataaacttctttataaaactttacgatttcttttatcgtatagccgttcagtatattagtagaatcaggaacatatacaattttttgctttatttcaggaaactgatgaatgtttgtatcttcatatgtaacagttccctcgtctgggtctaaaataccgaccatcgttcgcaataaagttgttttccccgcaccgtttcttccgagtaatccgatgatactccctctttgcaatgtgaaagaaacattgtctaaaattgtttgactatcaattgttttcttcaagtttgtcactttcaacatccgtattccctccaatctctttatagtatgaatctatccaatcatgaattttatctttcgtaataccaagataagaggcttctaatagtaattgatgaaattgcttttcaaccatagcgattttcctttcgtctaatgttggggtaatcgattgggatacaaatgttccttttcctcgtaacgtttcaataattccttgtcgctctaactcttgatacgctttactcactgtatttggatttataacgagtaaagaagcgagttcgcgtacagaaggaagtttatcacttggagccaacatgtttttcaatacgagttcttttatattttgaacaatttgttcccatatcggagtgttgcttcttgggtcaagttgaatatgcaagagcaatgtctccttcctcatatgtattaagtgtactactgtgagtaatacacttaatacaatataggggacgaatgtatttgtcaactgaaaatgttagaaaaatttggtattaaaaaaaggtaaattggaaaaaataggtctgatatagaatggagggttagtcatgaagcgagtttttggaatacttgtttgtttcatgttattgctttctggaacttcagtgagtttcgcacaatctgagaaaacgaagcaggagaaaacagaagaaacaacaccgaagttagcggaacaagcgtcgtcagcaatcgtaattgagcaagatacaggtaaagttttatttgataaaaacccaaatgaaaaattaccacctgctagtatgacaaagattatgacaatgcttttaattatggaacaagttgaaaaaggaaaactaaaactgaccgataaagttagagcgagcgaacatgcagcttcaatgggtggatcgcaaatctttttagaacctggggaagagatgactgtaaatgagatgttaaagggtattgcaattgcatctggaaatgacgcatctgttgcagtagccgagcatatcgcaggttcagaagaaggatttgtaaatatgatgaacaaaaaggcgaaagatctagggctgaaaaatacacattttcaaaacccaacaggtcttccggccaaagaccattattcgacagcaaatgatatggctataatggcgagagaattgatgaagtatccacttattcgtaaatacacaggtaagtacgaagattatttacgtgaagatacggataaaaagttttggctcgttaatacgaataagctagtacgtttttatcctggcgtagatggagtaaaaacaggttttacgacagaagcgaaatattgtttaacagcatcggctgaaaaaaatggcatgcgtatcatttcagttgtcatgggagcaccaacatcaaaagaacggaacaaccaagtgacgaagcttcttgactacgcatttggtcaatatatgacaaagaaattgtatacgcgcggcgaaaaaattaagacagttcaagtagggaaagggaaaaaagaaaaagtagatttagttgcatcagataatgtttctcttcttatgaagaagggcgagaatatggacaaggtaaaacaagaagtaattgctgaaaagaaagtaaaagcaccgattaaaaaaggtgacgcgcttggtacacttgttattaaaaaagataaagatgttttattaaaacaaacaattgtagcaaaagaagatgttgctgcagcgagctggtgggagttatttaaaagaagttttgggatgttttcaacatcaaaatagcggcaaatattttgccgcttttctattcgtatgtaagtgaataatgctgaaaggtttcactttatgacgaaatagttcttcttttgtcagcaggaaggattcttattttgtatcacgaaaatctttatgtatgtgaataagtaaagtttgagcataaggaggaaatcgtgtgagtctttccatgcaattagaagtaaaacgtgacgtcctatgtgtgagactagagggtgaattagatcatcatacggctgaagagttgcgaacgaaagtaacagatatgattgagacacatggtgttcatcatattgttttgagcctagagaacttatcttttatggatagttctggtctaggtgttatattaggccgatataaacacgtaaagggattaggtggagaaatggttgtttgtgcaatttcaccgcctgttaagcgtttatttgaaatgtcgggcttattcaaaatcgttcgcttagaagaaagtgaagcgcacgcgctcgcgacgttgggggtggcatagatgagaaatgaaatgaaccttcaattttcagcattaagtcaaaatgaatcgttcgctcgcgttacagtagcggctttcattgcacaactagatccaacgatggaagaattaacggagattaaaacagttgtgtcagaagcggttacaaatgcaattattcatggatacgaaggaaatgcagaaggtattgtttatatttctgtaattttggaagaagcaatggtgaaactcacgattcgagatgaagggattggaatctttaacttagatgaagcgagacaacccctttttacaactaaacctgaattagagcgttccggaatgggatttactatcatggaaaattttatggatgaagtagaagttatttcaaacgaatctttcgggacaacaatccatttgacaaaatacttatcaaatagtaacgctctatgcaattaaggagaatagcctatggacatagaggtcaaaaatgagaagaagaaacctcagttaaaggaccacgagctaaaagcgttaattcaaaaaagtcaagatggagatcaacaagcgagagatacaatcgttcaaagtaatatgcgcctcgtttggtcggttgtacagcggtttcttaatcgaggatacgaaccagacgacctatttcaaattggatgtattgggctcttgaaatcggtagataaatttgatttatctttcgacgtgaaattttcaacatatgcagttccaatgattattggtgaaatacaacgtttcttacgtgatgatggatcagtgaaagttagtaggtctttaaaagaaacaggaaacaaaattcgaaagatgagagatgagctttcgaaagaattcggaagggctccaacgattaatgaagtggcagaggcactagaactaacgccagaggaagttgttctagcacaagaagcgagccgggccccttcgtctatacatgaaactgtatatgaaaacgatggagatccaatcactattttagatcaaattgcagatcaatctgaaacgaaatggttcgataaaattgctttaaaagaagcgattagagaactagatgaacgagagcgcttaattgtatacttgcgttactataaagatcaaacacagtcagaagtagcagagcgcataggcatttcgcaagtacaagtttcaagacttgaaaagaaaatattaaaacagatgaaagatcgaatagacgaataattgtctattcgatttttttatgccgttaataggagagagatgttaatttttgcaaaaattaacagaatttattgataatttagtcaatttaaaatataatccaagtatgaacttgtcataaagggggaaggaaacatggaaacgaggcaacaatggggaacgagagctggatttatttttgcagcggtcggatctgccgttggattaggaaacatatggcgttttccttatacagcgtatgaaaatggaggaggagcattctttttaccgtacttatttgcattattaacgactggtatttcattgttagcgtttgagtttgcccttggtcatcgtcatcgtggttcagcaccacttacatttttccgtattagcccgcgtgccgaatttattggatgatggcaaatgtgcgtaacatttatcgtttcaacatattatgcagtgattattgcttggtctatatcgtatacatactttgcaattactggagcatggggaaaagacacgcaatcatttttatttaaagagtacttacatgttgcagataagccagggcaatttggaggacttgtaccggaagtattaattccattagttctcgtttggattattgtgcttggcgttgcatttaaaggagttaaaaaaggaatcgaagttgttaaccgtatatttattcctttattagttgttatgttccttattatcgtcgttcgtgcagtgacgatggaaggtgctatgcaaggactagatgcattctttaaaccagattggagtcgtatttttgatgggaaagtatggcttgctgcttatggtcaaatattctttagtttatctttagcatttggaattatgattacgtattctagttatttaccgaaaaactcggatacaacaaataatgcctttattactggatttgccaactcaggatttgaattattagcaggtattggggtctttgcagctcttggatttatggcgaataatatgggagtaccggttgataaagtagcaagtgctggcgttgggcttgcgttcgtagtatttccgcaaattattaatgaattgccgatgtcaccgttgtttggtgtattatttttcttatcgttaacggttgctggaatcacatcacttatttcactcgcggaagtatgttttgctgctgtgtctgaaaaattcagtttaagtcgggaaaaaaccattggaattatgggaacccttctcgtgttagtttctcttgtatttgcaacacgtggtgggcttatgttcttagatgttgtcgactatttcgctaataatttcggattaattacaattgcacttgcggaagtagtgacgatagggctcattttacgtcgtttaccagtttatcaaaatcatgcaaactttgtatctgatattaaattaggaacgttttggagagtaagtttactcgttattactccgcttatgttagggtatatgctaattgatggtacaatccaaaacattaaaaagaattatggagattatccgactgagtttgttgtaacgtatggttggtcgatagcagcagccttccttatcgttgcgctaattattagtctaaagaaatggaatgcacaaatacattcggattctgccaagcttgaaaaagagtggaaagatcgaggtgtttcataatgagtggatcagcaattatgatgatggttattggaatagtagtcatttggggagggcttgcattaagtattgcaaacttatttaagaaaaaggcataagtaaaaaacatctgtaccgaaatggtgcagatgtttttttatgaaaaaattgtattagaaaaaaattcaataaccatactacaactacgaggaagagtgaaggggtgaatgaaagttggaacaaacgatttatattaaaatgcgcaatcgtttaaaagtttctcctacttatgaagtaaagctgggcgatgttgctcaacttgccggagattcttccgtagttgagttgttacaaaatgagatagtttacaaaataacagcgcatgataagacgcatgttgtaattgatgttatgaaagtaattgagattattcaacagaaagcatctcatctacaaattaatttactcggttctggacaaactcttgttgaaattatatacgaaaaaaagaaggcacacccaatttttttcgggcttgtatggctattacttttcattggagcggcccttgcgatcatttatttccatgaagatgtaagtatgcaacaagtacatcaacggttatattacatgattactggagaatttaatgcgcaaccacttttatttcaaattccttattctttaggtcttggtttagggatggttttattctttaatcatgtatttcaaaagcgaattaatgaagagccaagtccgctagaagttgagatgtttcaataccaacagtcacttgatcagtatgtaatcgttaatgaaaacaaggataatatgaaacaacttaccgatgattgagtatggatttgttattttaattggtttagctggagggattgcggtaggtagcggatatgtcgcatttttagctgtacttggtataatcccccgtttagcccaattaacgagaagtggaaagcatattcaatattttgagtgggcagttattgcaggtactttaacaggggcttggtgcagtttgaaaaacattacatttcaaacgtcgcaatattggctcgttatattagggatattttgtggcacgttcattggaatgcttgctgcggcattaacagaggtgttaaatgttctacctattttagcgaaacgagtaggggtagagggcaagattattgttttactcgttgctattgtacttgggaaagtaataggatcgttgtttcactggatttatttcgtaaagtaggaggcagtatataaatgacaagtcagaaattgaaggatgattacataaataaagtgaaggagtatcatccaaagccaaactatttactaaattgtatcaaagcatttcttgtaggtggactcatttgcacagttggagaagcattgatgaaattttatatacattattttcactttagtgaacaagaggcaggaaacccaactgttgcaactcttgttttattatccgcgattttaacagggtgtggtgtatatgataaaattggtcaatttgctggagcaggatcagcggtaccggtaacaggatttgcaaattctatggcgagcgctgccttagaacataagagcgaaggggttgttctagggattgctacaaatatgtttaaactggcaggaagtgtgattgtatttggggttgttggtgcatatatcattgggttaataaggtatacctttaaaatttttatgtcttaaaggaggggctagtatgaggttgaccggaaaacaaacgtgggtatttcaaaatgatatatatgtaaatgcaacgggcactgctgtcggtccgaaagaagctgagggccctcttgggaaaaaatttgatatttcatatgatgacttgcattgtggagaagaaaattgggagctcgccgaacgaagattaatgtcagactcaattcaacaagcggtgcaaaaagggaatataaaaacatcgcaaattgatttctttttagcgggagatttattaaatcaaacagtgacagcaaattatgttgcgcgtaagtggggcattccttttttaggaatgtttagcgcttgtgcgacgtctatggagactttagcagttggctcagcttttatagacggtggatttgcaaatcgtgtcttagctacagtaagcagtcataatgcaacggctgaaagacaatttcgctatccaacagagtatggtggacaaaaaccagggacagcaaattcaactgtgactggtgcaggatctatattaattagcgatgaaaaaagtgcaattaaaattacgtcagctacaatcggaaaagtgcaagatttaggaatcacaaatcctttggatatgggggcagcgatggctccagcagcagctcatacaattcaacaacattttgaagatttaagaagaagtgccgatgattatgatttgattgttacgggtgatttatcagctgttgggacgccgattgcgaaacaacttttacttgaggaaggttatgatcttgggcatatatacaatgattgtggattgatgatttatgaagcaagtcaagaagaagtgtttgcaggtggtagtggttgcgcttgttcagcagttgttacgtatggtcatttattacacgagatgcaaaaagggaatttacaacgaatttttgtcgttgcgactggtgcattattaagcccaatgatgatgcaacagaaggaaacgattccaacaattgcacatggtgtcgtatttgagagagttaaaggagagtgaattgtggattttatatatgcatttcttgtaggtggagctatttgtttaattgggcaactattgttagatttcgtaaagttaacaccagctcatttaatggcaacttttgtagtcatcggagcaattttagatggatttggattatacgataaactaataaagtttgcaggtgctggagcgacagtccctattacaagttttggacattcactattgcacggagcaatgcatgcagcagaaaaacatggatatttaggaattggtattggcatgtttagtttaacgtctgcgggtatttccgcagcgatattgttttcattttttatagcacttatatgtaaaccgaaaggataaatcaaatgagacgaagggttgttttggtcacagatggagatgaatatgcaaagcggacaattgagcttttaacgaaggaatttgggggaaggtgtatttcagcatcacaaagtaatccaaccaaattgacagggaaaaaagttgttgagcttattatgcaaacgccatatgaccctgtatttgtcatgtttgatgacagtggatttattggagaaggatctggtgaaaaggctttaaaatatgtggctacccataaacaaattgatgtgctcggtattttagcagtagcgtctaatacgcatcattgggaatgggcacgtgtagatgtaagtgtagatcggaacgggaatttaaccgaatacggtgttgataaatttggacttccagatggtgaaattggcaggattagcggagatacaatatattgtttagacgatttaaatgttcctgtcattgttggagttggtgatattggtaaaatgtgcggaaatgatgaatgggagagagggtcacctattacaaagaaagcaattcaattaattttagaaaggagtggattttatgacgaagcctaaaaaagtggatatccctatatcaactttcataagtgacaatgaaaattatttaaaacagacagttggactaggcgttacatacgatgttggcattcgtaaatttcaaattttgaataaagaaattggtgtgttatttgtaaacggactttgtgatacaaattatattatccatattttagaagaagccgtggatacaaatgagataagggatgtagaagaagatacagttaagcttttagagaatcgcttaatccatcaacaagtaagcaaagtgaaaacgatggatgaggtaatgctccaagtattatcaggactcattgtgatatttgtagaaggtgaaacggaagcgttcgcgatcgatgttcgtagttatccagggcgaacaccgacagaaccagataccgaaaaggtagtacgtggtgcgagggatggatttgttgaaaatatcgttgtaaatacagcattaattcgtagaagaattcgagatccacgccttcgaaatgaaatggttcgagtaggagatagatcgcaaacggatatttgtattacatacgtacaagatgttgcaaatgcggatttagtaaagattataaaacaagaattaaataacattgatgtagatggaattacgatggcggataaaacagtggaagaatttgttgtaaagcaaagctataacccattcccgcttattcgatatacagaaagaccagatgtagcagcaaatcacctactagaagggcatgtgttagtactcgtcgacacatcaccaagtgctatgattacaccgacaacatattttcatcatttacagcatgcggaagagtttagacaaaatccagctgtcggtacatttttacgctgggtgcgctttttaggtgttatattttcgttatttttattaccattttggttagtgtttgtatttgatccaactcttttgccagcaaatctggcttttattggaccgactaagatgacgcatttaccaattttattacaagtgttaatggcagaggtcggacttgagtttttaaggatggcagccattcatactccaacgccgttatcgtctgcagcagggttgatttccgctatattaattggtcaaattgcaattgatgtaggtttgtttgtgccagaagtaattttgtatgtagcagtttcgatggttggtgcatatgcaacaccgagttatgaattaggattagggaataaggttgggaaattgtttgttattattttaacaggtctcttccatgagatgggatttgtaattggtatgacgatattaattttatttttaacgtctataaaaagtttacaaacaccttatttatggccgtttttaccatttgattggggcgcgttaacaaaaattttactccgtccaacaatgtctagtttaaaagtacgaccaagtattgtaagacctcaaaatgtaaaaagacaaaaataaacgggattatacacccgtttattttttttagcaaaaatttattattttttaacaaaaatcaaacattttttgtgtacacttagagtagatattgtgtatggaaggggaagaggacatgattaaattatttgtaagtgatttagatgacacgctcgtttacgatgtgaatcatatgcaaaaagaagatgaacgtgcgctgtgttggttagctgagaaagggacaaatatttgttttgcctctggccgctttacacacagaattgatgaagttgtaaaaaggttttcattcccatattacacaactggcttaaatggagcgacaatgttacttccggatgggaatttatttcatgaatcgagttttgaaaatacggttgctcaggaaatatatcggtatatacataaaaaaggactagcggatattgtttgtgcaaatgagcagcgatatacaaaaaggaagaatgaacatcaccataattttgaagcatatatgggcgtgcatatcgctgaaattgaagcgttagaagaagagtttggtaagactgtacaccctgcaaaattgtttgtttttggagaagaagagaaaattgtgacgttagatcaagagctacgagatacgtttcaaggcgaagcggaagtttttatatcaggtaaacgctatgttgatattatgccaagaggcgtgagtaaggggagtgctctaaagcgactaatggatcatttgcaaattgaagcaaatgaagttgcttgtattggagattctttcaatgatatttctatgtttgaagtaaccccacattcatttactcttcatcatgcccatccatatgtaaaggagaaagcaaatcacatagtgcgttcggttgaagaggctgttatgaaattaccgttacttgtataaaaaagaagcccgtcattggcgggcttcttttttacttgaataaagatttaacaaaatcaatgatacttgagaagaaatctttcactttatctagaaaactttgcccttcttcagatcctaaaaaggcagaaacatgttcttttgctttgtttaattgactaccaacttgattccaatcgatattaagattcttcattttatcaaataacgatactaagttatctaactgttcatctgttaatgtaatgccgagttggtcagcaatttttttaattaatgaacgtaaatcttctgttgtttttggctgttcttttgcaatttcttctttaatttttgcaacaagttgaactgctttttcttcaccaattttatcaccaagctgggctgtttgtaccatttcttcattcgctacttttttaacttcttcaggaatttgtttattggacgcagtttcgtatgctttcattaatccagttaaagctgcagttcctgaaactttaaaaggtgcagtaatttgaatttctgcatcttttacacctgctgtaatcaaagcgttagtgtacattgcatctgttacccagttaatgttctttgatcgtacaataagaccagatcctggttttgtgtatgtaatcatagaagaagaaattgctctcgtaccaatttgtgcttttggaacaatgccttctagaaatttatgttcttccgcattagatacagtgataattgtagcatcttttggtgttttcatttcttttaacagatcttgtttttgttgttcggataagttctctcctaatgtaacaattgattctccctcgatgatgtctgcaaatgaagctgttggcatcataaataccgttacagctaatagcagagctaataatttcgttttcacgaaaaatcgctccctttctctttctaaaattttcgggcaacaaagttattatagtatatatttcttatttgtcacctagctttttccacatttcaaaaaagaagtatctagattgtcggattctttttgtttctagtcatgaatgtggtaatatagtgctgagataattgaaaggagacatatacgcatgaaaactttaggatacatattaatggaaaacggtgaaaaaatcgacttggaatttttcccagaagaagcaccgaaaacagtagaaaactttaaaaaattagcagagcaaggattttatgatggtgtgacattccaccgtgttattcctggcttcgtaagccaaggtggagacccaacaggtacaggtgcaggtggcccaggttactctattccatgtgaaactgatggaaaccctcatagacaccttgtaggatcactttctatggctcacgctggccgtaacacaggcggtagccaattctttatcgttcatgagccacagccgcatttagatggtgttcatactgtatttggtaaagcaacaagcggtattgaaacagtattaaaaatgcgtcaaggcgatgtaatgaaagaagttaaagtttgggaagaataaggtaaggaaaaagagagcttttgctctcttttttatttttaatgagattgagtacttcttctacagctcatcatacaagtagtattgttgctaaaatatattgcttgtgagaacaaacctttaaccaattacatagaatacattacattatatgtttcaataaatattttttgttatattaattttgctagaattgtgctgctttagggtaactatgaatgaagtgctgttgaatgatatgtttctttccattccatataaaattttctttttttaactctatttattaaaggaatagtgctgaaacatagatttgactttcttcttttcgctttgtatgattatcaagttgttttagactcttctcactctgttgaaaatattgtaaaatgaatgtgatatgaaaagagtgattgaggggattactagtttgtaacttttgtaagaagggataagggttatgttaattcgttttaaaaaaagttatgaaaaaattgcaatggggcttctttcgtttatgccaactgaaaaagatgtgaaaacattacaattgacaatgaaagaatatgaagcaaaagatgattggcaattgtatttgtggaaagaaaatgaagattttgttggaataatggggattgtaaaaaaagagaatcaagtattagaaattcagcatttgagtgtgaacccgtctcaccgtcatgtggggattggaacgaagatggttcaagagttaaagagtaaatttcttgagtttacaatttgcggaaatgagcaaacggcaagtttttgcgaaaaatgtaaagggctagaacaaaatatacattcgtgaaagcagagataagtagtttattatctctgctttcttttttgtaattgttcgtttcgttcagtaatgacctctgtgcgatcacgcaaagtgtgcttgtttataatatattcacctgggatagcattcaagtctttccaagagaggttttgtttttgacataactctatgcactgcttctctaacgatgaatctgataagggtaaaaataaaggtacaaaacgttcttttttatggatagattgcaatctttcattgagcaaggaaagaagttgtacttgattaattcctaaacgttgtaaaggcacaccgcttttttctaaaattgtgattgcgcttttcatcatttttgtggaaccattccaattagcacgtctttggtggtataaagaaactgcgatttgaatgagaccaactaagtaatgatcacgattacctcttggttttgttttccaatactcttctagtatttcgtggcattcaaaatagtcataatctccatggaaatgaattaaaaattgtatgtattcggtaggatacatgttttctcgctcctatctaacggttatacatataagtgtatcatagaaatatgaacaataaacgactaggaggtttccccctagccgttattgttcatattagcagaagcaagctgctcctacaataattagtaaaataaacagtacaacaagtaatgcgaacccaccgctaaaaccacaatcaacgtgacccatagttttttgacctcctacattgttcttactacactgttatcatatgaagtggtgggcatgatgacataggcatcggtctatttttaattaaatttcttaaaaaggttggatagaacatgagtatgctctatacttatgttgttatagaaaaaatgtggtgggatgctttgtgcaatataattttaaagtagaggcttttgaagggccgttagatctattgttacatttaatacatcgttatgaaattgatatatataatattcctgtagcagatattacagagcaatatttatcttatgtgcatacgatgaaagaacttcaattagatgttgcaagtgagtatttagtaatggctgcaacgttattacaaattaaaagtaagatgttgttgccgaaacatgaagaagatgtacttgataacggtgatgattttatagatgatcctcgtcaagaattgatggagaggttaattgaatataagaaatataagcaagttgctactgagttaaaagaaagagaacaagaaagagcacagctatatacacgtccaccaattgactttacatcgttgcaacaagaagaggagacaagcttacctcttgatgttacgttatatgatatgctagcagcatttcaaaaattaatgcgccgtaaaaaggcaaaaaaacctgtaacaacacgtattactcgtcaagaaataccaattgaacagcgaatgactgatattttaaagcagttaaaaataaagggtggtcgccaaagtttttacgatttgtttgttgatgatgaacgtgaaataatggttgtaacatttttagcagttctggaacttatgaaaaatcaacaaatcataattgagcaagaacataattttgatgaaattttcgtatcaagctctaataaatctgcatagagcaagtatgtgaaaatgggatagaaacattttatctcatgctatgttttaatgtatcgtttggaacaagagaaaaaatattgaaccgaacgcattaattgtgattcggttttttgatgtgtatttttatgggaaaatagaaggaaggagctcgtgaaatggataggaaagaacaaaagtcaattattgaaggccttttatttgtttctggtgatgaagggatttatccagaacaaatagcgaaagttcttgaaattgaaatgaatgaagtaattaatattttagaagaaatgcaacaagaatgtgaaggtgcaaaccgtggtttgcaaattgtacagtatgcaaaagtatatcgttttgctacaaagaaagaacatgcttcatattatcaaaaattaatagatacaccaacagctgcttcactctcacaagctgccctcgaaactttagcgattgttgcatatcgccaaccaatcacaaggactgaaatggaagagattagaggagttaaaaccgataaggcgttacaaacgttggtttcacatttacttataaaagaaatgggaagagcagaaggaccagggcgtcctattttatacggaacaacaaaagaatttttggacacatttggattgaaaacattagatgatttaccaccgctttctgaagagaatgaacaaatgaatgaagcggatttattcttcggttccttacaagagatatcgaaataaaagcttagcattttgctaagctttttttgtatatcaattatttacagtgccatactaaatgaaaaaaggagacgagttatgagaagtatgcggattattttattattagtttctgttttattatgtttttctttaaatagcgcatcagctaaaaggtatatgatgtccattcatactacgtctcctttacatatgcatcggcaacatcttagtaaaatgaaagtgagctttttaaaagtggggcaaggtgacgcaacacttattataatgccaaatggacaaacaatgttaattgatggaggaccttatgaagcaggagaggttattattcagaaattaattgagaaagggattaatcatctagatgtaattgtcagtacgcatcccgatatggatcatataggagggttaattccaattgtagagcaaataccggtatcgcttatattagatagcggaaaaacatatagttctcttacttatcatacgtatcggaataatattaaaaaaagagggatacctttcgtttcagtaaaggaaggacaatatataccgctggatccacatgtttctatacaagtattaaacaacgggaaatcaaaagatgaaaataatgaatcctcaattgttttaaaggtgcgatatggaaaagcggattttttattaatgggtgacgcggatgtacgaacagaacatgaaatattaaaacaatttgatgtccatgcagatgtgttaaaagtggggcatcacggctcatatacttcaacaagtgaaacgtttataaaaaaagtggaaccgcagtttgctattttgtcgtacgggagtagtaatccgtatggacatcctcaccaaagtgtagtgaaacgcttaaaaaggcacggtataatggtatatagaacgaataaacgtacagtagaaatggaaacagatggtgaacatattatgttagagtctagcgggttaatgccattattgaagtgatttctatattagggggcgatactgtccctttttggaaaaatgaataatatatattataattataagagacgtaagaaatttccttttctgttgaataaaaaggaaattttattagaatgtatagacaactactcgtgtgtatattaagatggaactaggcgaataaggtaataataacaagtaggtaattcatgggaaaggatcgatgaaaatgaaaacgcaaattgtcatcaatgccaaaatttacacaggtcaagaaatagtggaaaacggatttattcgttacgcagaaaccattaaagaaattggtttgatggctcaatatgtaccacaagaaaatgaaactgtttttgatgctacagggaagattgtaattccaggtatgatcgatgttcatattcatggtggatacgatattgatgcgatggatgcaaatagcgatgggttagtaactctaggtaaagaaatgttaaaagaaggggttacaacttacttcccaacaacaatgacacaagctccagaggcaattgaagcagcgttaactgctgcaaaagaagcaaaagaaaaaggagcgcattttgaatatattcacttagaaggaccttatgtttcaaagaaacgtgcaggtgcacaaccacttgaacatatcgttcctgcaaatattgagcaatttaaacaatggcaagaagcaagtgggaatttaattaaattagtaacatatgcaccagaagaagagggagcattagagtttgaacaatatcttgctgaaactggtgtagttggcacaatggggcatacagatgcaattgatgcgcaactaaaaaatagaaagattacacatgcgacacatttatacaatcaaatgcgtggattacatcaccgtgaaccaggagttgttggtcatgtgttattaaatccagatgtaatggttgaagtaattacagatggcattcatattcaccctgatatggtgaaattagcatataagttaaaaggaccaaaaaaagtaagtgttattactgacgcaatgcgtgcaaaaggtcttgaagatggattatatgagcttggcggacagccagtacatgtaaaagatggtagtgctcgattagaagatggaacgttagctggtagtattttaaaaatggatcaagctttccgaaatgtaattgaatttacaggttgttcaatcgaagatgcagtactgatgacatcagttaaccaagcagaagagtttggattaaataataaaggtgcattagcggtaggaaaagatgcagactttgttgtgatgaatgaagatttacatgtatatgatacggttcgtttaggaattcatatgaaggaagggaagtaattaaatgaatattcttgttgtaaaaactccagaagaactagcagaagcaggttataaattaattgaagaagttgtaaaaacaaaagaaaatccaacattaggaatggctacaggaagctctccattaggtatttatgcagaaatgcgaaaaaataaacttgatacaagccgtgtaaccactgtaaacttagatgagtacgtaaatttaccacatgaagataaaaacagctatcactatttcatgcaagaacagttgtttgatcatcttccatttaaacaaacttatgtaccaaacgggatggcaagtgatttagagaaagagtgcaaacgttacgagggcattctagctgctaacccagttgacctacagattcttggaatcggtgaaaacggtcacatcggatttaatgagccaggaacaccgtttaattctccaacaaacattgttgaattaacagaatctacacgccaagcaaaccttcgcttcttcgagaaagaagaagatgtgccaactcatgcgattacaatgggaattggaagcattatgaaagcgaaacaaattctactagttgctatgggttctaaaaaggcagaagctgttaaagaattattgcaaggtgaatatagtgaagagtgtccggctacagttttacaacgtcatccgaatgtaaccgtaatcgctgatcaagaagctctatctttatgcagtgaggcgattgctgatgaacatcgacaagtattcaccatttccgatctattatcagattcaagagtgggtgaaacagctaattgaggacggcgaatggaagccgggagataaaatcccatctgagaatgaactttgtgataagttcgaagtgagtcgaatgacaatcagacaggcgattaataatttagtggaacaaggctatttatatcggaagcgtggaattggaacatttgtccaacttccgaaagtggaacaaaaattgcaaggaatgacgggattcacagaagacatgatttctcgtgggatgaacccaagtagtcaattacttagtttccgcctagttccagctactgctaaaatagcagaccggttgagaatacaggagggggaatcggtttatgaagtgaggcgtattcgcttagctgatgatgaaccgattgcttttgagacgacatatttgtcgccagctcttgtaaaagatattaacgaagagatattgcaacaatctttatatgaacatttagagaaaaaactgggctttaaacttgttagcgctactcagtcaattgaagcttccgttgcgacggaaaatgaagctgaacatctgcatattcctaaaaaggcgcctgtacttgtaatgcgtcaatggtcatattcagaaggtgaggtaccgctagagtacgtgaaatgtatttatcgtggagatcgttataaatttattacgaatatcgcacgtaacaaatagtatatttcagtttgtgaagtacagtggaattgaaaatggttaacatgtaaagaaataaaaatacgactcatccttataaggaatgagtcgtatttttattatgagcaattacgtggttaacagcatctttgacgtgatttactacatagtgagcgtgattttttactgcatcatctgcttgtgacatagcaaaactgtgaggagttaaagaaaacataggaatatcattgtaagaatcccctatacaagcaatttcctcaggttttatttgaaactcatttaataaaacagaaatggcagagcctttactaacattcggtggcattacatctaaacattgttctgctgagatgaaagtactaactttcccgtggaatttttcatcaatttttttctgaaggagttgtaagctctcctttgttccaccgacagaaattttatttgggaaaatcgtatcatcaatcttctgtagtaagtttggttcttcaacagaagtcatagttacttgttgttcaagttcttgaataaaaggtgttttctcttcaatgtaataattatgctcatcacttacataacggaaataaggatcttcattcgtcatagctaacaaatcgggaagtatgctggaatcaaaagttgcagataatagttgtttattttcatgtgtatatacaaaaacaccatttacactaatgcgatgaaaatttgtatttacagctttcattaagtctgcaatttcattatcaagtcttccggaagcgaagcaaagaataacattttgttcggcaaggctgcgtagtgccgcaacatcttgttcatcaataagacctccgtgttgcatcattgtaccatcgatatcacttacaaacattttaatcatgctgttatctcctttctatgtacagttgctcttacattatacgcatcatatataaacatgtctaaaaaatgaatttttattaaatggcagatgttttacattgacgacaaagaagaatattctgtaacataaaagtaggctatttaagtacgagggtggtgttatatgagtaattatctagaaattaaaaaagttttaaataataatgtcatcattgctagccatccggaacacgaggaagtagtagtgattggcaaaggaattggatttgggaaaaaagcgaaagatgtattggagcaagaacaaatcgaaaaaatgtttgtcttaaaaaatgaacgtgatcgtgaacaatacaaattattagtgccgcatattagtgaaaaattaattgaattgatgaacgatattatgctgtacattcaagaaaaagcgaaatctccactaaatgaacatattcatattgcgttaacggatcatatttcatttgcgattaaaaggttaaaacaaggacttacaattgataacccttttttagttgaaacaaaaatgctctatccagaggaatatgaaattgcggaaggtgttgtacaacttttaaattctcgtttgcaaattacattgccagaaggagaaattggttttattgcacttcacatttacagttcgcttacaaattctgatttatcttcagttaatcaaaactcccgtctcattgcacaacttgtatctttaattgagacaaacttacaaattacattagaccaagagagcattcattatttacgccttattcgtcatcttcaatatgctattgagagggtgaaaaaaggagaaaaagtagaagaatcgcaaagttttgctgatttattaaaggcggagtatccagtttgctataacttggcttggaagctagttaaggtcatgcaaaatgagttgcaactacctgtatatgaagctgaaagtatttatttaacaatgcacttgcaacgcttagtgaaggcagagcatgtgtaaaaagtcatatatttttgtctaaaatgaaaacgttaaaaaaaatgattgaatcgcttacaatagttatgtataataactattgcaaagttatacaaatttcgacaaacacattaaggtgagtaacgaaaacgtttgccttaattatagtgaacttatacgtaaacctatttttgacacgtgttactgattcgatcaggcatgagtggagaaaagtaaggaatgtaagctagagaaagggatatactaccctttgtatagctatcgttctatctttttttcctcatgtctttttggcgtttgtcggaaggtatcaatatagataagagaggaagggtttccatgtttaagaagatctttggtgttcttcaaaaagtcggaaaagcgttaatgcttccagtagcgattttaccggcggcaggtattttacttggatttggtaatgcatttcaaaatccacagttaacaaatattattcctgctttaaaagcagattggttcgtaatggttgcaaaaattatggaacaatctggtgatattattttcgctaaccttgcattattattcgcagttggggtagcaattggtttagctggtggagacggagtagctggtttagcagcattcgtcggctacttaattatgaacaaaacgatgagtgtgttcttagaagtagataagctagtgaaagtaacaagttctggagcagacccagtaaaaattggatttgcagatccagcgtatgcaaacgtattaggtattccaacgctacaaacaggggtatttggtggtattatcgtcggtatagtagcggcatattgctataataaatacttcaacattgaattaccatcatacttaggtttctttgcaggtaagcgtttcgtaccgatcgcaactgcaacattctctttaatagtaggtattatcatgtgcttcgtttggccatacattcaaggtggcttaaacacgttctcacatcaaatgattgatgcaaatagaacaattgcagcatttatattcggtttaattgaacgttcattaattccatttggattacatcacattttctattcaccgttctggttcgaattcggtcagtatacgaatgcagctggcgaattaatccgtggtgaccaaaaaatctttatggcacagttaaaagacggtgtagaattaacagcaggtacatttacaactggtaagtatccgttcatgatgttcggtcttccagcagcagctttagcaatgtaccatgaagcacgtccagaaaataaaaaattagcagcaggtattttaggttctgcagcattaacatctttcttaacaggtattacagagccacttgaattttcattcttattcgtagcgccagtattattcggaattcacgctgtatttgctggtctatcatttatgacaatgcaaattttaggtgttaaaattggtatgacattctctggtggtttaattgacttcctattattcggtgtactaccaggccgtacagcatggtggtgggtaattattgttggtcttgtactagcagttatttactacttcggattccgctttgcaattcgcaaatggaatctaaaaacacctggtcgtgaagtggcaaatgcaaatgacggcgcaggaaaagcagaagcaggcgaacttcctcgtgaagtattagtagcacttggtggtaaagaaaacattgcttctttagatgcttgtattactcgtttacgtgttcaagttaacgaacaaaagaatgtaaacaaagaccgcttaaaagaacttggagcagctggtgtacttgaagttggaaataacattcaagcaattttcgggccgaaatctgacacattaaaatcacaaattcatgatattatgtcaggtcgtacacctcatgttgaaaaagaagaacctgtaaaagtggaagaaactcctcaaaaagttgatgaaaatgaaacaattgtatcaccaatcgaaggaaaaatcttaccaattacagaagtacctgaccaagtattctcaggaaaaatgatgggagacggatttgcaattgagccaactgaaggaacagtagtttctccagttaacggtgagattgtcaatgtattccctacaaaacatgcgattggtattcaatctgaaggcggaaaagaaattttaatccacttcggtattgatactgtaaaattaaatggtgaaggttttgaagcgcttgtagcacaaggcgacaaggtgaaacaaggccaaccattattaaaagtagatcttgcatttgtaaaagaaaatgcaccatctatcattacaccaattgtctttacaaacttacaacaagggcaacaagtcgaattgaaaaaagatggaaatgttaagaagggcgaaaccgctattattgacattcagtaggaatttgacgcaaaatgtttataattataataggcgatgtggttgaccgaacatcgcctattatatacaatagatgatgtagtactcacatctatacaactaaaaaatactgtaatttaaaggagataaattatcatggaaaaaatctttaaagtaactagcgactcaggaattcatgctcgtccagcaactctacttgtaaacactgcaagcaaattcggttctgacattaacttagagtataacggaaagaacgttaacttaaaatcaatcatgggcgttatgtctttaggcattcaacaaaacgcagaaattaaaatcactgcaaatggtgatgatgcagctcaagcactagcagctatcgaagaaactatgaaaaacgaaggattaggagaataatgactcttaacattcaagggatcgctgcatcaagtgggattgctattgcaaaggctttcagacttgaaaatcctgaatttaacatcgaaaagaaatcaattacaaacgaagctgcagaaattgcacgcttagacgctgcgcttgaaaaagcaaaaactgaattagaagctattaaggaccacgcatttgctgagctaggtgctgacaaagctgcgatctttgaagcacatttattagtattaaatgatccagaactagtaaacccagtaaaagataaagtaaatagcgaaaaagtaaatgctgaatttgcaatggatgaagttgcatcaatgtttatttctatgtttgaaaacatggataacgaatatatgaaagaacgtgctgcggacattcgtgacgtaacaaaacgcgttcttgcacatttactaggaattaacttctcaaatcctggtacaatttctgaagaggtaatcatcattgctgaagatttaacaccatctgatacagctcagttaaaccgtaagtatgcaaaaggtttcactactgatatcggtggacgtacatctcactctgcaattatggctcgttctatggaaattccagctgttgttggtacgaaagttgttatggagaaaatccaaaacggcgatatcgttatcattgacggtttagatggagaagtaattgtaaacccatcagaagaaactcttcgttcgtttgaagaaaagaaagcgaaatttgaagagcaaaaagctgaatgggcaaaattaaaagaccaagctactgtaacaagtgacggacatcacgttgagcttgttgcaaatatcggaacaccaaatgatgtacaaggtattatcgataatggcggagaaggcgttggcttataccgtacagaattcttatacatgggccgtgacaatcttccaacagaagaagagcagttcgaagcgtataaagcagttcttgaaggtgtaaaagaaggtcaaccagtcgttgttcgtacacttgacatcggtggagataaagagcttccatacttacatttaccaaaagaaatgaatccattcttaggataccgtgcaattcgcttatgtcttgatgaacaagatgtgttccgtacacaacttcgtgcattacttcgtgctagcgtatacggtaacttaaaaattatgttcccaatgattgcaactcttgatgagttccgtcaagcgaaagcgattttattagaagagaaagcgaaacttgtagaagcgggtacaactgtttctgattctattgaagttggtatgatggttgaaatcccagcttcagcagtattagcagaccaattcgcgaaagaagttgacttcttctctatcggaacaaatgatttaatccaatacacaatggctgcagaccgtatgaacgaacaagtatcttacttataccaaccatacaacccatctattttacgtcttgtaaaaatggttatcgatgctgctcataaagaaggcaaatgggctggtatgtgtggtgagatggcgggcgattcacttgctatcccattattattaggattaggtttagatgagttcagtatgagtgcaacatctattcttcctgcaagaacacagctaagcaagttgtcaaaagcagaaatggaaacattagcagaaaaagcattaaagatgtcaactgctgaagaagttgttgaactagttaaaagcatataattaataaaaaaacctgagccgatttgaaatcggtctcaggttttttctatgagaaaagtaaatcttatttgcttactattgaggataagagacagaattagatagcgattgcaacgatatcagttgggcatacgcgtaaaataccagtaaaagtatttcgattttgattgttcttatcgtctttattgttatctttgttatctttgccattacgagctaaagcagagaaaagagcaacaccgttacagaaaccttcaaaaattacattgttgaaagtaccattacctctaatgcttaaaagagaaagctctgttccaactgaaatgctagcaagtacgttacatacagctggttgttgtggtctaactacttctctctctttctcacgatggtcgcgatggtcacactctctttcacgatgatgacagtctctaaagttatcacagcatccaaatgatccaaacataatcctcatcacccccttcacacttataatctatgtaagttcggtagttagtgactggacagagagtggaattttttctaggggattttctcattttaaatgactagctgggtgtttagtatggaatgatgtttaaaataggggagatataacaaaaaatgtaaaaaccaccgaaataaatgaaatgggtagcctttacacttttttacttttatataaaacgatgatatatacgggaagagctaggagtaatggtacaatggatcgtgcagtgtgtttttctgattctaattggaatgcttcttcttttggaaattgtaaaatggagatgtttgcggcatcaccaataaaatatagaagcagtacagttactatgtaacataaaagtgcgataaagcttccgtatgaactcaatgaaaatccctctcttgttatctatttgttatcattgtatcacaattgtaacaaaaatacacgggtatatttcaatgccttaacaaaattcgacacgaaacgtcacgtttatttatgataagggaatagaatatacttttccataagtataaatgtcgaatgatttgtagtaatattacaaaagtatgacagggaataaaaaaacgaaggcaatgtagttgccttcgttttttattattttgcccactcgctcacttgctctacgctcatgcgaggtgcagggtggccttttaaagttgattcaccaattgtaataagcataattggaacgtaacgagatgaaacgttaaattcgtctgtcagtgcttgtgggttgaagccaccaatagcacaagtatcccaaccagttgctttagctgcaagcataagttgcattgctgctaaagatgcatttgaaaaggcagcatctcttgggaattgttcacgagcatatgcagattcaatatttttagctaagcgttcttttgcttcttctttcataaatccttgttctacaattggaccatatactggctcaacatttttataagcttctaaatcacctaaaatagcgactactgcagaagcatcaagaatttgttgttggttataagctattgggtgtaatcgtttttgtacatcttcaccttgaaaaacaaggaatttccagtgttgtaagttccaagcggaaggtgcttgtgctgcggcttttaaaatctcatgtaattctgtagatgagatttctttatttgggttaaatgcacgtgtagatgtgcgttcatatagaacatcaaaaaagttgtcgtttgtcattgtatatcctccaaattgtatatcgaattattttcaaaaaaataatatacactacttacattttgtaagttatcgaatttaagaatataatatctttattttaattgtcaagttttaaaaattagctagggcattcatacaaacgatacaattcctacaatcatacactaaaaaaggaatttatagagtgaaaagcgaagataacattctcaattagcttgttaatatgtatctctcacaaattaaagtttattggagaccagtcttttaaaaaagtttgtgaggaattcagtagaacaagatatatgaagtgagtgaagactagtgatgaacatactacattttttattagagaatacggttttccaaaatgtgttacaagatctgcagttaaatgtcctttatatagaaaatggatgtaagcatcaacaaacggtagaaaatatccatccaaaatgtatgtttatagcaaatagttttgaagagggcgaactattatttcaaagaacgaaaccacacattatcattacgtatgtaacagattattctcaaataaaatatataaagaatatgtatactccgcacagtacattcattgtcatttgggatcaacaaataacaaaagaatttacagatgtacttgcattaggaatacgtaatattgtaatagctcctgtaactccgcaagcagtgttagaggaagtgaataagagtttgtatcaactttctttagtaaggcaagttagtttgcagcaggaattgcttcaaacgatgtttgattttcaaaatgatctattatttatagtagaagatgatgaaatagttgattgtaatacaaattttttagcttttttcggatatgaaaatttgtttgcctatcgtgagcaacatttggtatttgctgaacattttattagagaaaatggatactactcgacgacgcatgatataacatggctagacgatactttatctagtggtagaagaattaagatgttaaattatgaaggggcagtatctacttttctattacgtgcgacaccattgccagaagatttatcaagatttattgtaaagtgcacggaaattacagaattagatgaaatctatcaagaacaagaaagacttgctatgatagattcattgacagagatttataatcgtttaaagtttcaacaaatactagaggtagaatgggaaaaggtaatacgtagtgatgagaaaatagcaatcattttatttgatatagataattttaaaacagttaatgacacatatggtcatgattttggcgatttagcattaatacaacttgcagagcttatgaaatctaaagtggagcagcaacatgtatttgcaagatggggaggagaagaattcattatattagtgacaaatacagtagaaaaggaagcatttcaagttgcggagtcattacgattctttattgaaacaaagcaatttactggaatttcgaagttaacagctagctttggagttgcgttatatgaacaaggaactacaagagaagaattaatgcaacgagcggacattgcattatatgaagcgaaaaaaaatggaaagaatcaagtatgtgtgtatagaaaagaaaaaatgtaatttttcgcaacaaattgttgcgatttttttttattgtttgataatagaataggggggataatttttagcgaaggaattatggaggatcaatatgataaaaaaagtaatggtgatggcttcactgtctgctatagttggcggcggagtatactattttcttgttagccccaatataaaggaaaacactgtattaacaactaaagtgaatcctactattgaatcggaagtacaagggaatatagaagaaaaagaagagcaacaaattgattatgctagcatatctcaaaaattagatcaatatttagtcggaaagcaatttaatggaacagttttggtaacagataaagagcatgttatattgaataaaggatatgggtatgctgatgttcaaaataaaatagaaaatacgcctcaaacaaaatatcgtatcggttctattacgaaaacagttgttgccacatctattttacagttgcaagaacaaggtaaattgaatattcaagataatgtaaataaatatattccttcatttccggagaataaaaatattacgctatatcatttattaacgcatacctctggtttacctgaacatgcgaaaggaaatgtgaatgctgcttcccgtttacagttaattaattggattggacgtcaaaatttagaatttcctgcaggaacaggttggagatatacagattataattatatggttcttgcttatataatagaacatatctccaaaaaacctttaggagattacataaaagaaaacatatttataaaagcagatatgcatgaatccggtatgggaaatatggtacctggagataaaaattttgcaaagggttatgtgaaaaaagataaagagcttgtaccagcgcagaagttaggcatggattggctatatggttgtggtgagatgtatacgacagttggagatatgaagaaattagacgaagcaattataaatggaaaacttctttctgaacaaagtatacaagcaatgttttcaccttcagcagaacggaaatatgcatttagtttttatatatatccagattattttcataatcatggtgtattatctggttggaacactttcaataattttaataaagaaaaaggaacttttgttatgttattttcaaatgtgaaaaatagtatggatgatgactttaataaagagttccgaaagatggtaaatgatttattagaacaaaggggatgagaaaatggaacataaaactttatcaataggtttcattggtattggcgtaatgggaaaaagtatggtttatcacttaatgcaagatggtcataaagtatatgtatataatagaacgaaagcaaaaacagattctttagtgcaagatggtgcaaattggtgtaatacgccaaaagagttagtgaagcaagttgatattgtaatgacaatggttggatatccacatgatgtagaagaagtgtattttggtatagaaggaattatagaacatgcaaaagaaggtacgatagcaattgactttacgacatctacacctactttagcaaaacggattaatgaagttgcaaaaagcaaaaatatatatactttagatgcacctgtctcaggaggagatgttggcgcgaaagaagcaaaactcgcaattatggtaggtggagagaaagaaatatatgatagatgcttacctttacttgaaaagttaggaacaaacattcaattacaaggaccagctgggagtggacaacatacaaaaatgtgcaatcaaattgccattgcttccaatatgattggagtatgtgaagctgttgcttacgcgaagaaggctggactgaatccagataaagtgttagagagtatttcaacaggggcagcaggtagctggtcattaagtaatttagctcctcgaatgttaaaaggagactttgagccaggattttatgtaaagcattttatgaaagatatgaaaattgctttagaggaagcagaaaaattacaattaacagtcccaggcttaagtttggcgaaagaattgtatgaagagttaattaaggatggcgaagaaaatagtggaacacaagtattatataaaaaatatataagggggtaaacgaggtggaccttcaaaagtttgatgagatgattgatactgtacagcgagctacttgtatgcaaattaatgaaagacaaaaagaagcttttaaacaaaaatatgattttgaaccagaatttgaatatggaagagatgagaaggggcattatgtaattcgaacctcaaaaaagatgttagaagaaatggagttttatttagcattgaaatatgatcgtgatggagtggatctttatatgcaagctgagattgacggcatattttatgtatctattagctatggtgaagatgccctacatctacaagaattgtttcaatttctagaagaaaataaataaaagtcctcaaatgaggacttttatttatttagtcatctttaatttttataattataagttagaagcccggcggcatcgttcaaccgggaacgggataatttgtgcgatgtgattagggccaaattgttttgtacgagcatggcgtattatataaaaagcacacagaattgaaacaggaatagcgccgaataaaccaaataataaagcgcttacacaagatgcgacaaatcctaaaacaccaatttctaactcttccataatagctcctaaaataacaggaaatgctccacatgtaactccaagtataagtgcgataagtaagctcatgattatccccctctgtttgcgatattattttccttcttagttaattgtagtatatcacatataaaacagaattttcagaaaaaatttaataaatgttcaaaaaatgttcgaaaaatgcacttgaaaaatcaagatgttaaatttgtgatgaaatagtactttcaagtaaataaaaaatcaggcttatttcaaaatgaaataagcctgttccataggaggatgtatatatgtagagtgaataaaagtttggaaaagggggtccaagtccttttattcaactaactaccttaatagattggaacccagccttcagttgtcacaaaaatacgaatagctacaacttggcgatcatcttgcaaggtaaaataatgtcttgcattttcaggaacagatattaaatcgcctggctcaagttcaacatcaaagaatttcccatctttaccttcaatagcgaaaatgccatgaccactgacgataaagcgaacttcgtcatctgtatgatggtgttccttttggaaattaattaataattcgtcaaggttaggggtgctatttgaaagtgaaattacatcatgtgctttataaccacggcgtgctgaaacatcagcgatttcttttgaaaacacagctaatatttcagctttgttttcatctgttaacgaataattttcatttaaatgagtaggaagtttagaaatattccatttctcatataaaacgccttcctcttgtagaaatttagatacttccacttcattttcaatacgagtatttacttcatgaatacgaatttgcgccattagaaacgcctccttgaattgataatagttttatatgaaattggaataaaaactcataagcttctaatctcttctttgcatcaaagctatctcggccccatacagtaataccgtggttacggattaatactgcacccgaatctccttgtatatgctttcggaagttttctccaagcgttgggatatgggcatggttttcaataataggaatttgaattgttgcaccttcttcccaaatatcgagtgctttaataatttcttgattttgaagggtgactgcatcactatataaatttgtgatgacattattatcagttgtatgaacatgaagtacgcacccggcattcgtattgttataaatgtgtgtatgcaatattgtttctgctgaagggcgtaattcagtctctaaaacgggaactcctacatgatctactaatagaaaatcatctggagtggtttttgttttatctttaccgcttgctgtaataagaaaagtaagtggttcatggctaacctttatagaaatattaccacttgttgctggaaaccaatttcgtgttgttaactctttttttaactcgcttaagtcataccattgacgaaaaagttgtttcatgccttcacctccaacaaaagttttaattcagcttgcacatcttgaaatgtttcaaacggtgtataagcaatatgattttcttcacactttgtaataagaaaatcgcgagcgaatactttatcagcttgtttcgcggcttgtaaatcagtaatagaatctccaattacaatatgaaagtcatttgtatcacttaatttacggattaatgatgatttacataatccgcaatgattttgacaatgatcatcacaagaatgaggccatttaactgtaataaactctgctgaaaagtctgtttcattacaataaatttgctcttttggaatgattccttgtaagagtggatagacgaagaaatccattccacctgatatcacgtaaaaagaaatgttattttcctttacgaattgtataaactcatgaaaaccactacggatttcagcagtttctattaaaaattgaataatatcatcgtgcagattagtaggtattaattgaaataatcgagaaacaccttcttgaatggatagttcttgtgataaaattttattctttacttcttcggcttctggtggtgcgaatttttccataatggacataatgttatcattatttgtaatcgtgccatcgaaatcacaaaatacttgaatactcataatttcacctcataagagggatttccccatatttgtagtgcactatgcaaatttatgtcgtctacttcatggagtggtttattttgcaaagtagcatcaattgcagtacggaaagctttaccgccgccttgcgctccatttggatgtccgtgtatcccgccgccagcattaataacaacatctttaccgaaatctcgtacaataaagggaacgaaaccaggatgaataccagcagacggaacagaaaagctcttcttgaaaaatgcatcgtcttcagttaaatattttgagatagcaagagcctcctctttttctagcgcaacacttccgtatggagatgggaataatgaaaagtcagccccagcataacgtagtagctttccaagtaataatggtgatgaaactccatataacttggatgctgaataagcaccacttacagcaggatgtgccataataggaactgggatttcatcatcttctgcaagtgattgtagtacatctagtccgtaagcaaatacgttaaataatagaatatcagctccagcttgcactgcacgtttagcattttcttttaaatcaaaagttcgtcctgttaaatttaaggcatataacgttttatgaccgtatgtttcgtagacagattgtaaaacttcttttccagatacaatgcgtttcgtaagtggtgttaatgcattttcaaataatatttcatcatcttttactatatctacaccaccaattgcttgatcgcgtaattgtgtttttaaatacccaatgtttcgtccaatcattcctttaaaaatactcattaaaaggggacgatcatgcacttgtaaaagatttcgaataccatctatcccgaattttggaccaggaaaatgtttttttaactcgtctgaaaaagttaagtcaattagttttacttcgccatcaagtgatagctttccaaatgtagtcgttaaaatcgctggtaaatctggactgaagtttaatagcggatattcgattttaataattccgcgttttacttttttacgtaaatacgaattggtatattcatgttcagctaattcctcaacatgaatgacgttgcctttatgctgctttaattgttcttgcaataagtgtggcaaatgagtccaagagccaattgttaaaccgagtgcaatttgctcagcttttttttctaagttatgtgaatcatcatggattaaatacgtcgctataattccgctcattgttataacctcctagttaaataaaaaaacctctcagctaaggagaggtttttttacaaccagctccttatctgtcagcgtaatgctgcgagaattagcaccgtgtctacaattgtagatcggttgccgggtttcgtcgggctcgtccctccacctgctcttgataagaagtatttagaaatgtttaaatttttaagataactgaattttgtcagatatttttcgtgttgtcaattactttttgaaaaaatttaatttatcaattcgattaatggcttcccgtaatctatcttctgcatgcaagagaccaacacggacatacccttccccatgcttaccaaatccaacaccaggagcaactgcgacatgtgctttttctagtaaaatatcagaaaattgctcagaggtatatccttttggaacgggaagccatgcaaagaatgatccttttggaatgtctacattccaaccaattgagtgacaggctgaaataagagcgtttcttcgagattcgtaactatttacaaggtctattacgcaagactgtgaacttaatagcgcttctcgagcagcatcttgaactgcaccgaatatactaacatacatatgatcttgtaataggttaattgtttcaatcacactttcattccctacagcaaaagcgatgcgccagccagccatattgaaagtttttgataatgtgtaaatttcaattcctatatctttcgcaccatctgcttgcaagaaactaacaggtttttgaccatcaaatccgatagcgccataagcaaaatcgtgaacaactaatatattatgtttattagcaaagtgaatggttgcatcaaaaaaatcttttgatgcagtagcaccggtaggattatttggatagtttaaaaacattaattttgcacgctctgcaatagagtcatcaatgtttgtataatctggtaaaaagttattttctgcaataagcggcattgtttcaaagtgtgcttttgctaaagcaaccccggataaataatctggataacctggatccggaacgagaatcgtatcaccaggatttgtaaaacaaatcggtaattctactagtccagccttcccgccaaacaaaatagcaacttcagtttttgggtttaattcgacgccgtattcacgtttatagaatgtagccacggcttcctttaagctttcatgtccgcgaaatggcggatatttatgatgaatggtcttttcggcagcatcttgtaaagcttttacgatatgctgcggtgttggttgatctggattaccttgacctagattaataacatcgtgaccagctgcaacgactttgttaacttttgcaacaagtgaagcgaaaaattgtgttggcaatgatgttactatctcagaaggttgaaataatttcatactttccacctcttttgaaagttgttacaattctagtgacaaatgatataatctttccagtattttgtaaagaaaaaaataagaatggggctgaaaaaatgaaagtcgcatgtattcaaatggatattgtttttggagatgtagaaaaaaatattgagaatgctaaaaataaaataagcgaagctatgaaggaaaggccagatgttatcgtcttaccagaactatggacaacaggatatgatttaacgagactttctgaaattgcagatagggatggagtggaaacgaaagaaaagttaatagaatgggcgaagcaatatgatatacatattgttggtggttctatagcaaagcaaacagagcaaggcgttacaaatacgatgtatgttgtaaataatgaaggacagctagtcaacgaatatagtaaagtacatttatttcagcttatggatgaacataaatatttaatagccggtaatggtacgggcgaatttaagctagatgatgtcgaatgcgctggaacaatttgttatgatattcgttttccagagtggatgcgtgtccatactgctaaaggggcaaaagtattatttgttgtagcagaatggccattagttcgtttagcacattggcgtttgctattgcaagcaagagcagttgaaaatcagtgttatgttgttgcgtgtaatagagcaggaaaggatccaaataatgtatttgcgggtcattctttaattgtggacccttggggtgaagttgtagtagaggcgaatgaagaggaatcaattttatttggagagcttgaattcgagaaaattaaagaagtacgtaaaggaattccggtttttgcggatcgccgtccagaattatacaaataaaatgttgacaagtgatttttattcttggtatagtcttcaacataaagttaaaaattcaaaaaattatacaactcttatcaagagcaggtggagggatttggcccgatgaagcccagcaaccgaccgtaataccattgtgaaatggggcgtttattacgccaaaaggcacggtgctaattccagcagaaagtaaaaccttctggcagataagaggggagaagataaacttcaaacctctttcttagtggaaagaggtttttctatgttagaaaaacctctgaatttaaaaagggggagaagacgatgggatattattcattaacagaaataacagctgtacaatatgcgaaagatcatggctattttgaagcgaaggcaaatgtcgtttgtcatgaaattggagacggaaacttaaattacgtgttcaaattagatgatggagagaaatcaattataataaaacaagcactgccttatgcgaaagtagttggtgaaagctggccattgtctataaaaagagcaacgattgaaagcaaggcattacaaatttttgcgcagtatgtaccggattatgttccagtagtgtacagtcatgatgaagagttagcgataacggtaatagaagacttatcaagactaacaattacaagaaaaggattaatagacggagaagaatatccgcttttatcccagcatatcggccgttttctagcacatgttttattttatacttcagattttggtttacagtcagaagagaagagggtactagaaggtacctttgtaaatccggacctttgtaaaattacagaggatttagtgtttacagatccgtttggacattatgatacaaatgattatgagccagatttacagctcgtggttgatgaactttggagtgataaaactttaaaactaaaagtagcacaatataaatataagttcttaacaagaaaagaaactcttattcatggtgatttacatactggtagtattttttcgtcaccttctgaaacgaaagtgattgatccagaatttgcgacatatggcccatttggatttgacataggtcaatttattgcaaatctattattaaatgctttatctagagaagaagaaaaaagaagtgtactatttttccatatagaaaagacgtggagttattttgtagaaacttttacaaagttatggattggagaaggtgtagaagcatatacgaaagaaaaacaatggttaccaattattttgcaaaatatctttactgatgcagttggatttgccggatgtgaactgattcgtagaacaattggtttagctcatgtagcagatttagatgaaatagaaaataaagaaacaagaattcaagctaagaaacaagcgctatccttaggtaaagaactaataaaatatgaatctaaaagtgctgatattcaactgtttcgaatattatttcaacagacagtttcagggggcgtaaaagcgtgagtacaattgttactgttccgagatctgtaagctggaaaggtgatgcaattgcggtattaaatcaaacgaaattgccgcatagcacagaatacaaaacattgacgactattgaagaggtttggaaaagcatcgtaatgttagaagtacgaggagcgcctgcaattggaattgtagctgcatttggcttggcgcttgcatcaaaaaaatataacactgtacatattgaagaatttcaaaagaagtttaatagagattgtaattatttaggaacgtcacgcccgacagcagtaaatttattttgggcaattgatcgtatgagagaatctattcgagagattactacaataaaagaagcacaaaaaacattagaagaagaagcgcttcgcattcagcaggaagatgaagaggtgtgccgaaatattggggaatatgcgttaacatgttttaaagatggcgataatattttaacaatctgtaacgctggaagtatcgcaactgccagatatggaactgcattagctcccttttatattggaaaagagaaaggtgtgcgtttacatgcatatgcgtgtgaaacgagaccagttttacaaggtggtcgcttaacgacctgggaattgaagcaagcaaatattgatgtgaccccatgcccatcaacttaaggatagaaactctacggttttccattaattgaaatgaagcaaagcgtgaattaggctgggaggcaacacgcggattagaagaaatgtgtgctgactcttggaaatggcaatcaaataataaaaatggctatttagaagtttaatgatgaatataaaaaatgacctttgcataaaagcaagaggtcattttttatattcattttctactaagtttattagcgaacctagaaaagaacgttcgctgttttaaatgatatgattttacaatatcttatgctagaaggtagtagaatgagatagagtaatgtattattttattaattttttatgggaattgaaagcgtattattgaaatgtattccaacacttgtatcattgctagagtccgtttataatcaaggaatcctagttcatgttttgataggagtatttattattgaaagcgttttaagttcactccttttttgaggtaggaggtctgacttatttaggtgaaaaattatgtatgtagttttaaatgggaagaaaaataatataagtatcattttatagtgtggggaggttaaaagtgtgaaaggtaaagattttcacacgaatatatatgggttatgtaggattattactttcaggggcagctttatttttaaatagtcttgttatattagggaaagcagagatgaaaagtgcgggtgtttttaatttatttgtgggtgcactacaaattattattccgttttatttgattatgatttctgaccaaagcaattggacagtgtattcatatgcggctactttcttatttggattaacttatttatatgtaggtgttacttttataaaaggaatggatagtagtggtctaggatggttttgtatttgggtagcaattatagccttattctatatggttgtttcatttgttcaattccatgatgttgttaatgcgttaacgtggtttatgtgggcattactttggtatttattctttgtattaaatacacaaaagaagaacattaatcaatatcttggaaggattgccttcgtacaatcatgggtaacattgactttaccttcactcttttattttatgggagtgtggggagagggattcgtatatgaattatgggtttatgtatctgtaatttctattttatacttctgttattgtatttataaatatcgagtacgttaatatattatctgtataaaggcatggaatcgttaaacgaattccatgctttttatatgttagcacttataatagagaggtagtattttacaatttgctaaagtggggatgatgaagttgaaaaaagtattggtgctagggggaacaagattttttggtaaacatttagtagaagcacttttgcaagaggggcacgatgtaacgattgcgacgagaggaattacggaagattcttttggcagtagagtaaaaagacttattgtagatagggaagatgaaaaacaactagcagagcgtctaggagataaaagttatgatattgtatacgataatttatgctatagctcgaatgcagcgaaggtaatatgtgaagtgttacgagggaaaacgaagaaatatgttatgacatcttcaatggccgtctatgaacctgccctaagcttatcagaagaagactttaatccgtacgagtatgcaatcgcgtatggagataggaatgacttcaattatggtgaaggaaagagattagctgaagccgttgtatttcaacatgcaacattcccagtcgttgcagtgcgttttccagttgttattggagaaaatgattatacgaaaaggttacaattttacgttgaatgtattgtgaaccaaaaacctatcgttgtggatcatgtagatggaactttgtcatttatacatgaaaaagaggcaggagagtttctagcttggtgcggaatggcaaatgtgagaggaccaattaacgcctgtagtaacggagcagtttctatggaagaaattattcatttcatagaagagaagacaggaataaaagcactcattcagaaagctgggggaaatatagctccttataatgaggtaactaactgtacgttacataatggaaaggctcgtgaattcggatttttgttccgagagctgaaactagaaataaaaaatattttaaaacattatataaatacaatgaagtaatcataaatcccccggtggcaatccgggggattctggaggatttcgacaatactgattttacattaccaaatttaccttatacgtacgactaatgtttttgtgattgaattgcttgtaaatacttctcgtttacttggtcccagtttactgtatgccaccagttggtaacaaactctgggcgcctattttgatactttaaataataagcatgttcccatacatcaattacgagtaaggggattttcccttcttgcaaaggcgtatcttgatttggtgtactcataacagagagttcctcaccgtcaagaacaagccatccatagccacttccaaaacgactaatagctgctttggaaagttgatcttttaagttgtcaaaggtattgaaataataatcaattacttttgcaacgtctccattaggctcaccgccacctcgtgggctcatcacttcccaaaaaagactatgacaatagtgaccaccgccgttatttcgtacagctgtaacaatttccttcggtaaagcatctaaattacatagcaattcttctaaagatttattatgtaattcagtataattttctaaagtagcatttaaattgtttacgtatgtcgcatggtgctttccatgatgaatggcaagtgtattgctatcaatatgtggctctagttcatcatagtcatatgaaagctttggcaattgaaatgaagacataacattccctcctttcgacttaaaaagttggtctaggtaaaaatactttacctgagtcaaaaatacacccattttccatataagtcaatagtaattccattaattttctgaaaaatattacaataaaagtaacactctcactttcatttgtgactcctatcctttttgcttatactgtaaagtagcagggttttgttgaaatagaaggagattgtttatgagtaaaacgaaacaattaatagaggaagcaagtaattttattacgatttgttataaggagcttcataaagaacaattgatagcagaacgtataaaagaaattcaaattgagatagagaagacagggacatatgagcatacatttgaagaacttgttcatggttcacgaatggcatggcgtaacagtaatagatgtattggaagactattttggagtaagatgcacatattagatgcgcgcgaagtaaatgatgaagagggtgtatataatgcattaattcatcatattaaatatgcaacgaacgacggaaaagttaaaccaaccattacgatttttaagcaatatcaaggtgaagaaaataatataagaatttataatcaccaattgattcgatatgcaggatataaaacagaaacgggagtgattggtgattctcattccgctacatttacggacttttgtcaggagcttggttggcaaggagagggtacgaattacgatgtattgccacttgtgttttctatagatggaaaagcgcctatatataaagaaattccgagagaagaagtaaaagaagtgccaattgaacacccagaataccctatttcatcacttggagtaaaatggtatggtgttccaatgatttcagatatgcgtttagaaattggcggtatttcttatacagccgctccgttcaatggatggtatatgggaacagaaattggggcgcgcaacttagcagatcatgatcgttataatttacttccggctgttgcggagatgatggatttagatacatcgagaaacggtaccttatggaaagataaggcgctaattgagttgaatattgccgtactacactcctttaaaaaacaaggagttagtattgttgatcaccatactgctgcacaacaatttcagcaatttgagaagcaagaagctgcttgtggtcgtgttgtaacaggtaattgggtatggcttattccaccattatctccagctaccacccacatttatcataaaccgtatccgaatgaaattttgaagccaaatttctttcataaatgatatttagtgtagtttttttctgtgaaatataatttttttaattactgttatgtagcaaatggaagcctttactctcggttatttttggaagaggctttttgaaccaaggagttccttatgttataatcaaatttctgtttcgaagaccttatagaaatataaggtcttttgttttgcttttttatgtaagaggaagagattctttctttttaataagggatttggcatatttttagggacaacataagtatgtgggaagtcgataaaatgttatgcatatataattattgtgttttggttttaaacaataaaacataataaagttgtttttttagattgctgaggaaggaggaagtgtaaatgaggatgaagagtcgaaaaactgattggcctgtatttattattagtggtggttcacttttattatttgtaattgcagtttttttgaacaaggattatgtagagagtgcgattaataaaagtttcgctttttcaattaaatatttcggtgccttctggcaagttttattattaggtacatttattgttgcgatgtgtatggcgttctccaaatatgggagagttaagcttggaggattagaaaaacctgagattagtacggcaaaatggcttgctattattatgtctacattacttgccggaggtggcgttttttgggcagcagcagagccaatgtatcatttgatgacggtgccaccaatacatgatggtatatctgctggaacgaaagaagcagttatgcctgctttagcacaaagttatatgcattggggatttttagcatggacgattttaggtacaattagtgcggtagttatgatgtatggacattatcataaagatatgccgctaaaacctcgaacgcttttatatcctatttttggggaaaaattaagaaagagcctgcttggaacgataattgatgcagctgcaattattgcagtagctgcaggtacaattggcccaattggatttttaggtttacaagcaagttatggattacaagaattatttggaatttctaatgtgtttactactcaattagcaattattgtttgtgtggtggccgtgtctaccatatcggcagtaacaggtattgataaagggattcaaattataagtaatttaaatgttagattggcaattgtattaatggcattcatattactatttgggccaggtggatttattattgattcgtttgtttcttcgtttggattttatgtaaatgagtttataccgatgagcacataccgtggtgatacaagttggttaggatcttggacaatctttttctggggatggtttattggatacggaccaatgatggcaattttagtgagtcgaatttcaagagggagaacgattcgagaaatcatcgttgcaattggaattatcgcacctattattacaacgttttggtttactatattaggtggatcaggcgtgttttatgagttgatgaatcctgggtctatctcggacgcattaagtgaatctggtatgccggcagctatgattgcaattacaggacaattgccactttctaatattattggaccagcatttcttttattaacaattttatttgtagtgacaacaggggattcaatggcgtattccatttcaatggcagtgactggagacggagatcctagaattagtttgcgaattttttggtcgcttattatgggcgcagttgcagcaattcttttatatatgggtgaaggaagtattaatgcgctacaatcgtttatcgtggtgacggcagttccggtatcaattttgttattcccaatgctatggttagcgcctaaagttgcgggagaattagcattaaaacaaggtattgtaaaagaagaagataaaactgcattcttatttcagaaggctagtaaatcaaaataaataaaaacgtaaaagaggaagcatcttaaataagatgcttcctcttttacgtttaatctaatacttttccctttgtttctggtacacatagtagcattgtaattaacccgattgggtagatgataaaaatcaaggacaatgctccaagtaggttgccacctgtagcgagtaagccaataataacaggcccaaatccagctaacccacgtcctgtaccgaaaataaagttttcagcggtagagcgagcttcagcaggatagttttcagctaaaattgctccaaatcctcccatcattccatttgcaaagaatccaagcaatgcacttccccataataataatgttgaatctgtgaataagaagaagtaaatgagacagtatgctgtaccgccaatataatagattgcaaaagttttacggcgaccaattttatcagctagaataccaaagattgcaattccaattagcataccgatggtagaaatgaacatccagccacttgcttttgctaatgtatagttatatttatttgctaaaatagtgggcatccatgtgaagattccgtaatatccgaagttttggataaacgacataataataagaccaattgttgtaattgttacttttttattggcaaataactttcgaagtgggaatttttttatatgttttagttgttctgcttcagtagttgttaatttacctgtagcttctttttgcaacagttcctttttgtagcgttgtttttgctcccatattttcggttcacttaaacttttacggacatagacagctagtaaagctggaattaatccaaataagaaaacggctctccatccaaagtgtgggacaataaatgctggaaggagtgaagcaatcagtacaccaaattgccatccaagtgcaacaacagatgtcgctttagcgcgcatttctttagaccaggtttctgttacgatggccattccgattccgaattcaccaccaactcccattccaactaaaaagcgcagaattaataattgccagtagtctgttgcgaaataaatgagtgcggttgctagtgaaaacagtaagattgtgaaggccattgtacgaatacggccaaataaatcagcaataaatccaaataaataagaaccaattaacattcctattgtggtagctaaagttaagtttccaccttcaacaggacttaagtgaaactcttttaaaatatagacaagtacgaaagataatagcaacatatctaaaccttctgctgcatatcctagcgcagaaccaaataatgttttatatcttttcgcttttgtctcctctgttgtttgttgtacatcagtagtgacgttcattattactcctccttattttctacagtcgctatggaagaataacaaaaggccttctcacctgatatgatgagaaggccaaaaaagcatacgtatccccaaaaaagaacatacgtatattgtattccgacttccttctcaacctcacggggttgggttaaaggactgtattatattactttatttttagcactcttctattgtattgtcaaataaagaggaagttattatgtgtaaaatatttcaaaaaacatttcgttcttcttgacgccgacttcattattttcccataataaaactaactaaataaaaaggaatgaatcaaagatgctaaatttagtactcatgatgatcgaacgagtcggacttatagttattttaggatttttactctctcatattaaaactttcagacgcctccttcataaacaggatggctatgtagataagctgaagcttatttgtattttttcggtatttacaattgtaagcaattacactgggattgaaatagcaggaaatacgattatgaatgaaaactggttacaaggtgtttcttcgtcaagtacaattgcgaatacgcgtattatgggtgtcggtattagcggcttacttggtggccctatcgtaggggttggagtaggatttattgctggtattcatcgttatatgcttggtggtacgacagcgctaagctgcgcaatctcttctattttagctgggattataactggttatattggatatattttcaaaaaatataatcgtacaattactcctaagttttcagcagttttaagtgtttttatcgtatctttagaaatgctaatgattttattaattatagaggatggaattagcgttgtgaaaacaatagcgataccaatgattcttgtaaatagttttggaagttttattttactttctatgatacaagctattttgcgtcaggaggagaatgcaaaggcacttcagacccataaagtattacgtattgcagataaaacgttaccgtatttccgccaaggcttaacagaagaatcatgtaagcatgtggcacaaattattcaccgttttacaggaacagatgcggtatccttaacagatacagagaaaatattagctcatgttggattagcatcagatcaccatattccttcacatagtttaataaccggtttgtcgaaagaagtgttaaacacagggaaaataatgaaagcgaaatcacgtgaggttattaattgtcaacatgaaggctgccctttgcaagcggcgattgtaattccactaacttcgcatggaaatacgatagggacattaaaactctatttcaaaaatcctaaccagttaagtcgtgtggaagaggaattagcagaagggttagcaaaaatattctccacgcagttagagttaggagaagctgagttgcaaagtaaattacttcaagatgcggagataaaagcattacaagcgcaaattaacccacactttttatttaatgcgattaatacagtatcagctctatgccgaacagatgtagaaaaagcaaggaagttattattacagcttagcgtatatttccgttgtaatttgcaaggggcacgtcagttattgattccactagaacaagaattaaaccatgtacaggcatacttatcactagaacaagcaaggttcccaaataagtatgaggtaaagatgtatattgaagatgagctaaagacaactttagtaccaccatttgttcttcaactattggttgaaaatgcattgcgacatgcttttccgaagaagcaaccagtatgcgaagtggaagtgcatgtttttgaaaaagagggtatggttcactttgaagtaaaagataatggacagggaattgaggaagaacgtttagaacaattaggaaagatggtagtttcgtcaaagaaagggactggaacagctttatataatattaatgaacgtcttattgggttatttgggaaagaaacgatgcttcatattgaaagtgaattaaataaagggacggagattacctttattattccaaaaaaagtaggggaggaagagccgggtgttaaaagtattagtagttgacgatgaaatgttagcacgtgatgaactaaagtatttattagagagaacgaaagaagttgagataattggtgaggctgattgtgtggaagacgcattagaagaactaatgcaaagtagaccagatattgtgtttttagatattcaattatccgatgataacggatttgaaatcgcgaatatattaaagaagatgaaaaatccacctgcaattgtatttgctactgcctatgatcaatatgcgctgcaagcatttgaagtagatgcgttagactacattttaaaaccatttgatgaagagcgtattgtgcagacattaaagaagtataaaaaacaaaaacaagcgcaaatagaaacgaagcacgaaataaaggggacagatgtaacagcagagatgcataaattagcattaccaattgaagaatcaatcgtacttgtgaatattgaagatattatatatgtagggcttgtagatgggaaagtaacagtaaaaacaacgagggaaacgtatgtaacacatgatacacttgtaattttagagaagaagttaccacaagcaagcttcatgcgcgtacaccgtagctttattgcgaatattaatcatattactgaaattcagccatggtttaattctacttataatttaatcatgaaagaaggatcgaaagtacctgttagccgtacatatgcaaaagaactcaagaagctgcttcgtatttaagaagcagcttttgtatttcatccttttatatttgtaactgattctgtatatttgacgttctgttatgtaaacgcttacttatacgtttgtatcctatacaataaaggtaccaaatcgaaagaggtggccaaaatgagtacgaaaaaagtatatagtttcttatcacaagcattcatattctcagctattatgttaatttctaatattattgcaacacatttaccaattccaatgccttcatcggtaatcgggttagttattttatttagtctattatgtttaaaagttattaaattggagcaagttgaatcactcggaacagctttaacaggtattattggattcttattcgtcccatcaggtatttcagttattaattctcttggtgtaatggggcaatactttgtacaaattttaactgtaattgttgtagcaacagttattttacttgctgtaacagggttatttgcacaatttattttaggaaaagatgaaaaagaaacagaagatacaaaagaattgaaagtagtaaataaaggacgcaagcacggaaaggttgcgtaaccattgcatttatatattgttaggaggtaatgaacatggcaagcacaatgactccatatttcggaatcgtcgtttcattaatcgcatacggaatcggaacattattattcaagcattcaaaagggttcttcctatttacaccattattcgtagcgatggtattagggattgtctttctaaaggtaggtaactttacttttgaagaatataatactggcggaaaaatgattagtttcttcttagagccagcaacaattgcatttgctatcccactctataaacaagttgataagttgaaaaaatattggtggcaaattttatcagctatcgtggttggatctatttgctcagtaattgtcgtgttcattgttgcaaaagcaatcggtttagatacagcagtaatgaattcaatgctaccacaagcagcaacaacagcaattgcgttaccaatttcagaaagtattggtggtattccagcaattacatcgtttgcagttattttcaacgcagttatcgtatacgcattaggagcattattcttaaaaacatttagagtgaaacatccgattgcaaaaggtttagcacttggaacagcgggtcatgcattaggagttgcggtaggaattgaaatgggtgaggtagaggcagcgatggcaagtattgctgtaacggtagttggagttgtaacagtagttgtcatcccaatgttcataccattcattggatagtaaaacttacttaaaaaataagaaaagcaagctatttgtaggacagatttctactgatagcttgctttttatgttacagtagtggtaagacctatttaaaaaaatgtaagtttccttaaatcttcattaatactatgtagaatacgttttgaattaggtcattgtattgtaaaataagaagtaagctactatatacctgttaaggtaggcatataatgagtttataaaaatcttaatatgaataataattaaaagtagaaaaaagagagaaatctacttattaacgttttagtttataggacaggagagagtattcgtcgattatgcaaataaaaaacctgtttcaaagtaaaggattccagaggttactcgtattagtaatacttgctctcgtgttatacgggctgcaaagtatgttgaatttaatattaattacgtttattctcacgtatttaatggatcgattccaaaagtttatttcccgcaaattagatcatttcatgcctattaatcgaaaaattattatagcgtttctatatgtaatgttaattggtggaattgccattacgctatttaaatatttaccagtattaacgatacaaatttcacaattgatttaccaattcaatgtatttttaagaaacccaccagatagtgaactaattaagtatgcagttaatgctgtcaatcatatggagctttctaaatatgtaggacaaggcgtagacattttgtataaatcaattacgaatgttggtaaatttggccttcaagttttactttctttaattttgagtttgtttttcttattagaaaaatctcgtattgtcggttttactgcaaagtttaaagaaagcaggcttgcaattttctatactgaaattgagtacttcggaaagaaatttgcacgttcatttggaaaggtaatcgaagcgcaatttttaattgctgttgttaactgtgttctttcagttatcgcattatggatattaggatttccgcaattattaggtttagcattaatgattttcttgcttggattaattccagtagccggggttatcatttctttattcccactttgtatgattgcttataatattggcggtattatgtacgttgtttatattttgattatcgtaacagtgattcatgcgcttgaaagttacgtattaaatccgaagtttatgtcgcaaaaaacaaatttaccgattttctatacttttatggtattaattttctcagagcacttcttaggtgtatggggactgattatcggtattccaatcttcattttcttactagatgttttagacgtgacaagtgatgaaatggagaaggatgttggaaaaaataaagtgaagtagagaaaaagcatcgatgttcgatgctttttcttttataacattatgtttcttatgccatactgtaaggagaatatagaataggggtgaagtaatggctgtaaatgaaaaggtagaattggctacatttgctggagggtgcttctggtgtatggtttcgccatttgaagagatggaagggattataaaggttgtttctggctatacaggtggtcataaagagaatccaacgtataaagaagtatgttctgaaacgacgggacattatgaggcagtacaaattacatttgatgcaaataaaatgccgtatgaggagttattaaatatatattggagacaaattgatccgaccgatattggggggcaattccacgaccgcgggcagtcttatgaaacggtgattttttatcataatgaagaacaacataaaaaagctgaggcctcaaaagaagggcttgagcagagtggacgcttttcaaaaccaattgcgacaaaaatactaccagcagctacattttatccagctgaagaatatcaccaaggatatcataagaaaaacacattccgctatgagttatatcgtaaaggctcaggacgagatgcttttattaagcaacattggccaaaggatactgctcatttaaaagaaaaactcaatgagatgcagttttatgtaacgcaggaaaatggtacagaaccaccatttcgaaatgagtattggaaccataaagaggaaggtctttatgtagacatcgtttcaggtgagccgctatttacttctctagacaaatttgatagtggatgtggatggcctagttttacaaaaccagttatgtcagcaagtgtgaaagaaaagatggatgtgagtcataatatgacacgtacagaagtgaggagtaaagaaggagactcacatcttgggcacgtatttccagacggtccaggaccaaatggccttcgttactgtattaattccgcagctcttcgatttattccaaaagaggaattagagaaagaaggctatggcgatttcctaatcttgtttggaaataaaaaataacctcgcagttagcgaggttattttttattattttgtttttttctttttaaatttgcttaatatttcataaacgattggaacaataagaagtgttaataacgttgaacttgttaatccaccaattaccgttacaccaagccctttagaaattaagccactaccttcaaatcctaatgcaagcgggataagagcaccgattgttgcaattgcagtcattaaaattggacgaaggcgtgttgcaccagcttctaataaagcttcacgtgttgatagtccttcattttctttatgaataacgcggtcgataagcacgattgcgtttgttacaacgataccgattaacataagcgcaccaatcattgcagatacacttaatgtttcaccagagattaataaggcaacaagagccccaataattgtaaatggtagcgagaataaaattgcgaatggtgcaagggcaccaccaaatgtaacgacaagaacgaagtatacaatggcaatcgcagctaacatcgctaggccaagttgcttaaatgattcttgaatatctttagtaacaccgcccatagaaacatctacaccagaaggaagatccattttatctacttctttttgtactgcagcagatgcttttgaaacgtcatcagatgttaatttggcactaacctctgcataaacacgtccatctcggtgtgttactgtattcgatgtttcaccttcttttacagtcataacatctttcacagctacttcattaccaagtggtgttgtaattttgcgatttgttaagtcatcgattgtttcataattttgtttttcagcttctacatatacattgatatctttaccgtcttttttaattgttgtcagaacagggcgatcatgttgattagaaagtcccattccaatttgagcagccgttaagcccattttactcagcttttcttgatctgcgactaaagtgtactctgcatatgtttttgcaatactagaatctatatcttttaagtctttatttttcttcatgatattttgaatatcttttacgacaggcttaatgtcttctgagctatctccgtaaacgtatagtttaatttcgttactaccgccacttgctccgaagtcttggtttttccattcgcctttgccagacatcttctgtaaatctttaacgacttgttctttctctttttcaaagtttttcgtgtcgttatcatattgcacgaagaacattgcttggtttgattgaccaggactcattggattctctccacctaatgagaactgaattgttttgacgtttttattatcttggaagtgcttctcagcttttgttgcaattttttcaacgtcttctaacgtttgacctggttcaggattatatgttgcaataatcattttttcttcttcagaaggtaagaaacttacaccgataactggtacaagtgcaagactaccaaccaatagaaggacagcgatacttgatgtaataattttgtgatttaaagcccatgcaagtatgcgtttatacccatttgctaatttacttggtttttcttcatgatgtacttctttttccctcatactctctttcttaaataaagagtgagctagcatcggtacgattgtaacagctactagtaatgatgctaataaagcgaagacgatagttaaggcgaatggtaagaacatttcaccaatcataccttttactagtccaagtggtaaaaatacagcaattgttacgatggtagaagacataattgggataaacatttctttcgtagcttcacgaattaaatcttttccgcgcaatttctcttctgataacgacatacgtcggtaaatattttcaataacaacaattgagtcatcgacaacgcggcctatagcaacggtcattgctccaagtgtcataatgttaagtgtaatatccatttgctttatgactaaaacagcaattaataaagaaagtggtattgaaacgacagagattaacgttgttcgaatatttcgcaggaacagcataataataacgatcgcaaagatagcaccgaaaattgctttgcttagcattgtttcaactgatttttcaataggtgcaccttggtcgaatgttgaaataatctctaaatctttatattttttctcaagatcttttactttatcttttactgcatttacaacatcaactgtatttgcatcagaggccttcacaatttgaattccaattgcttcttttccatttgttcgagaaatggattctgctttcccaacttctttaatgtcagcaatttcttctaatgtaactgttggaatcccgttcatagcagctggattcatttgcggcgtttgtgcaccagcgccggcattttgactaccttgaccgttaggtgaggaaggtatagctgggattttaagttcttttaatgctttaatcgttgtaatattgccatctacaacaactgatttttccgtgtctttaaatgtatataagccaagtggtaaagatacatccgatcccttaatcacattttttacagtatcttcacttagtcctagttctttcattttatctttcttgaagacaagctgtacttcatctacttgttggccagcaatttggacagatgcaacaccatcaagtccttttaatcctggtacaacattcttttctacattttcagttaaggtagctaaagattcattcttgcttgctacgcttaacgaaataacaggaaaagcattgaagtttactcgtgaaactttagggtctttaacaccatctgggagcttcacattcgtaagagcttctttaatttctgtttctgctttttccatatttttatcaaaatcgtattctactcgaatagaagatgcgttttgaaaagatgatgagctcacaacgttaacaccgcttaaattttgtagttgttcttccatcggctttgaaactttatcagctacttcttctggtgtagcaccaggatagaccgtagttactgtcacaatcggtgttgtaatatcagggattgtttccagcttcatattgagtccagagtagatccccgcaatagtaacaataatggttagtagccaaactgcgaacttattttttaacgagaaattgatgattttgttcatgtttgcgctccctttttattatattgaccaactggtcagtctaatacataatataactgaccgttcggtcaaacgtcaataaaaagagatggtataatacatttataatcagatgcgagattaaatttaggagagaagatatgaaagaaaaagagcgtttaattatagaatcggccatgaagttatttgctactaagggtgtaaatgcgacatcagtgcaggaaattgtgacagctagtggtatatctaagggagctttttacttatattttaaatcaaaagatgagcttttattagcgacacttcgatattattatgacaaaatccaaaagaaaatgctggatattgaacaagagtctttattaccacgtgaaaaatttgcaaaacaattacactgtcagtttaatgatatacaaaaacataaagaatttattattatgcatgcaagggaaaatgcaattccgtttaataaagaagtggaagaatttatgatgcggatgaagttagagtctcatgcattttatcggaatagtttattgtccatttatggtgaaaagattatgccatatttattggatttagtaattatagtagaaggcatatgccgtggttatttagaattaattattttacaagcaccagaaattgatttatcgtatgtcgctgcttttattttaaaaagagtagatcatttagtaaatggtttggtagaatcttcagaagaacctattttacatgaagaaaagcttggagaattcctttgtaaatcagagctcattaaggaacaagttaaagagcattttttaaaagaaattattgtatttaagcgtaatttagcggatcaattagaggatgatgagttgttagtaacgttagatgttttagaggcggaaatgcgattgcttaatccaagaattccggtaattagaggtatgttagcaaatttagaggcgtatccggaattaaaagaatttcgattacgccttataggatactacaatataaaaaattcttaatagaaacaagtaaaaaactccttgtgtacacaaggagttttttcttaaagactatttactattttgagaccattcttcaacatcccaaacttttgtgatccaatcttcatagaagtccggttcgtgacatacaaggaggattgttcctttatatgctttcatagccttcttaagttccgcttttgctgtaacatcaagatggtttgtcggctcatcaaatagtagccagttactttcctcacccattagcttacataaacgaacttttgcttgttctccaccacttaattgacttaatgggcgagaaatatgttcattttttaatccgcattttgctaacatcgcacgaatttgatgctggtctaaaccagggaatgtattccatacatcatcaattggtgttatattatcagctttaacttcctgttcaaagtatgcaggctctaagaagtcaccaaggcttgttttaccgcttaaaggtttaattttacctaagattgtttttagtaacgttgatttaccaacaccgttacatccaacaatagcaattttttcaccacgttcaatcgtcattgatagctttggtagtagcggatgtgtatatccgatttctacattttcaccttcaaagacgaagcgactacttgcgcgactttctttaaatgagaattccggtttaattgctgtttccggacgatcaataagctccatgcgatcaagttgtttttgacgactctttgcacgacctgttgttgaataacgagccttgttctttgcaatgaagtcttcttgctttttgataaactcacgctgcttttcataagcgtttatatgttgatttttattgatttctgctagttctaggaatttttcatatgtcgctgtatagcgtgtcatttttgtgaattctagatggaaaataacatcaacacatttgttcataaattccgtatcatgagaaattaataagaatgcatgtgggtattcttttaaataatttgttaaccaatgaatatgttcaacgtctaaatagttagtaggttcatcaagcaataatacttctggctgttcaagtaatagctttgcaagcaatacctttgtacgttgtccaccacttagtgctgaaacatcacgatctaaaccaatagcatcaattccaagaccacgtgcagcctcttcaattttcatatctagtaaatagaaaccacctgcttcaagtgcatcttgtatttctgccatttgttcaagaagttcttctagttcttctggtgtagcagttcccattttttctgtaacttcatttaaagctttttccttttcgaataacggtaaaaatgcatccgctagtacgtcacggatcgtacgtccaggcgttaaaacagtatgctgatctaagtagccgtaatgtgtgcccggtgtccattctacacgaccttggtcatgaataagctgaccagtaatgatattcatgaatgttgatttaccaacaccgtttgcaccaactaatccaacgtgctcacctgctaataatcgcatagatacatctttaaataatgtacgatcaccaaatgtatgtcctaatttttcaactgttaataagctcatagtatcctccgtccaacttgaaatagtaccttgaatcatgatactaaattctttcatataatgccatcatttcaaaatgtatattttttcaaaagaagtgtttgtaaatgttagtatataaaaaagttacttctacctacagaagtaactttttggttatgccttttgtttaacttcactaactttcttttcagctacaataaaatgcggtctacgttttgtttcataataaatacgaccgatatattcaccaataacacctaggaatatgagttgaataccgccaataaatagtatagcggaaatgagagtaaagtaaccaggaacttccacaccaccaaggatgatttgaacgaacgtagtgattacgtataaaagtcctaaaatggttgttagtaatccgagatatatagatagacgtaacggtttattattaaatgaaattacaccatcaattccgtaatttaataatttcgagaaggtccatttactttctccatcagaacgtaatacattttcatattcaatgattaattcgttataaccgatccaagaaaataagccttttgaaaatcggttgtattcacttaaagataataaagaatctactgctcttcgacttaaaagtctaaagtcaccaataccgtctactaattcaatatctacaaatttattcatcactttatagtaaagacgagagacgaaagagcgaacgggtgaatcaccagttcttgttctttttgcaatgacttggtcgtagccgtcgttatatccttctaacagttcttttattaacgtaggagggtgttgtaagtcagcatccataataacaattgcatcgcctgtagcatattttaaaccagctaacattgcagcttcttttccgaagtttcgactaaatgatatgtagtgtactgacgaatctgaactagctaaatcacgtaaaatatttaaagtatcatctttactaccatcattaacaaaaacaaattcataatcggtagttaatttatgaatttcaagagaagtctctgaataaaaggctcgaagcaccttttcttcattgtagcatggtacaacgattgaaagagtcatttttgacactccttgtttgtagtgggttaaaacaatgttatgcgtttttatatgaatctatccaattggatagattcatgattcattgattgctcattattgctttttaaaagaaaattttcgtcgtgcttttggatttttgaaaattagtaaagctatacagataattagtgagatgattgatataatcatacctaatttgaagtaaggtgtaacgtaagtcatttcgattacatgtgaaccttttgtaatgggaacaccgataaaggcagaattcgctttcgtaaattctgtttcttttccatcaatttttatagtccagcctttactatatgggacagataaatataagagcccgtctttatttgatttgatatccccttttaaataattgttcttataataaatattttcaagcctattttcagttagtttttttgtttctttttgtacactttcatagtttacaatatttgcttgcaagtcacctaattcatactcacctgccatatcaatagagatagttaggttttctggacgctcattgcccaaattgtaaacaaacctttctaacggataagagtatgcaccagcatcgtccccttttcctatcgtttttccattaacagttgcattgaatgtgcctgcattttttaattttaattctatcagtagatcaccaggtgtatcaggataattgataggtacaatcatatttccaaagccatgaacaattagtttattttcttgtttttctatgttttcgaattttgctttttccgttttaatagatactgcctttgatttaaggtcttgtttattaaaatggtttaatgaaaattcttttgtattattaacgacaacagcatgtaataataattgatcacgctgagcgaagtttaatttagaaaattcttcctcacttatagccgaatcatatacatatcctaacggtaaagcatagtcatttttgtaaatattatacggtcctacttgctgtaatagtttatatccataaggcacattctttgaatctgtatcagcacttaatacgcgatattttacacctagcatattttcaagtagtagtcgactatcagcttgataaaacattgaaggtgtatcgtacatttggaatacaccatatttatttttcataaagtcatggacataataattaactaagctttgatacgtacttaagccatgataaccttgtagcattggtgtgttatattcgctatatggattaagaatacgataaaagtctttatcattttcttgtatgtagcgaattgcagcaatttcttctttattatcatagcctggttcgtgtaacttttcagttgaaatctggctctgtccgtaaacggtgctaagtatattattcgcatacatataattcatagaaattgtgctaacgagtacattcaatacaactaaaaattgtatgaaaggtttggaaatataacgccataaacatactgtaataacagaaagaacgacagttccgagtaaaatgttatcaacgtcttgtaaaggtttatcagttacatttatatttgcttttctataaaatgcataaatgaataatccaatagacactaataaacttattaaataaggtaatttgtagtctttcttatgaataatcatccaatctagaatgtatgcaattgtttgggcaattacaaatacaaataaatagaaccatctagattgcattgctgaaaaaccattaaacacagaatatgtatatggaagcataaacagaatgaacatgaataacgtaaagaatactttatttttaacgagtttatcacgtataaacattccaaatacgattaagaataaaattaaagctggtaaagctaattgatgattttcagcattatacatgaagaaaatattttccattaaatctttataaaatttatcttcaaataataatggtatctcaaacttttttgatagtcgatcagcactaaatacggcattaactgatgggaggaagcaaacggcggctaaaccgagtgataatccatacaataaaccgattctaatataataagttagaaaagagacaatcgttttattttgttgtgtcgcaaagtattggaataatgcataaataaatatgaaaatacttgtgataaaagcaaaataaaagtttgatgctaacattaaagtagcagcgattaggaaaagtccgcgcttcttttcaataatatatttatcaagtccccatattactaatggtaaaaatacaatggcatcagccatgaaatcccatagtaaagagtggcggatgaaagtaatacaaccaccatatataatagcagcaacaaaagatgagaatgctgttttattatggtaacgtaaagaaccatatatgaataccatagctaaaaagttttttaaaatactcatgtataatttcacgtcatatacttgctcaagacttagtttaggtagtaacagtgtaatccagaaaaacggtgatgtgctgtaataataactaaactctccaaataaatctccacctaatccataatcaaaagaccaaaaaaggttgccatctttaaaggcatgttgtagaagaaacgtaaaaaaaccaaattgacgtaacgcatcccctgtaccagaaaaggcttgattagatgttaaaaagaaataatgaaaagcaaaagcgcacaataataatattggcataattattattgttttcttggaaaagaatttattattcggctttatgctcataaaaattgataatcctcctttgaaagtcgttacatgtagcaactagtttttaggtagcatataaaaacacaccaatttttaaaggtgtgttctttagttttaacatgagaaaatatatatttttgttgaagcatatatatttttacaagcgttgaagttcatagtttacatgtaatttagtataaggcattttcagaaagtaagtcaatttgagctggaatatatagcatttttttactgaagaaaaatgatggtatataaaaaagcaaaaagcttttccatttttaaataggaaaagctttttgcttttaagcatgtttgcgaataagcttttgttttataaatcctaaaacgaatccacgtatttgaggatcaattacaattccgattataccgtatagtataccagtaagagttaaagcaactaatggtggtaagttgattaatgcaattcggtatataccgtaactaataataaaggctaaggaattaaatataattcctttaactaataattgcatgcctttacgaataaagagggtaaatccaattaatagtgtaatttcggtaatgatggctgcggcagctgcccccatcattccatatttactacctaatacaatataacctatgatggcaacaactaatccaatagtcattgttgttgcacgtttccattgctggccaatcgttgttaaattatcggctagtggatagttaattgattgtaaaataaccataaacgctagaatagcaagagcgtcaccagcgggagcgtatttttctcctaataaactaacaatccagaaacttggatcagcaataaaggggatagaaattcccattcctaaaaaagacataagttttaattcaaaacttgataattttctatgttcttcaatatttttctcattaccaaaagcaaaaagtcttggataaaaagcagctgcaattactccaggtatttgatatagtacagcaggtattttagatgcagcaccaaagaatccaacttgcttatatgttgaaaccttttctaatataatagggcccaattgtggtaagagcataataatgattccgttgatcgtgaaaataagtagttgatctaaaatgcctttatcccaacccttatggactttcgtgtaacgtattgtcattataaaggcgataacacctgttacaagactagataccccgtacatggcagcaaccatcataagtgaccattggaaagacatccctagtaatagggcagcagcagctgttacaccttgtagtacagaaataatagctgtaaattgcatgcgttctgttacttggaagtaagccataccaacaccttgtaaggttgctccgaacattgttggtaggacaacccaatataccatcgcacgtaagtaagcatcgggatagaagaactgggcaaaaatagcgaaaagtacagaaattacgatagctaatattaaacgaatacgtaaataactacttattagcacactaatattagcatcgcttctcgttccttcacgcataaacgtatgtgttaaacctgcatctgtaaagtaacaaataacagctgaaactgctaacgcagttgtaaacataccgtaatcacttggagaaacatatcttgcaaagaaaattgttgcaatagccagtacaaagcggacagtaatgtttcctacaaagaggtaggatgcgttttttagaattttatttgttttcatgagaaaagacctttctattctttaggacccggttagtttgtcctatttgtaaatttaatttgttcacagaaagagagagtatcgttatattttcagtttaagaaaacagaaatttaattcgtacaaaccaaagcattgcatatagttttttactacgctttccattctttgaatagattttacggcaatatttccttatatcttttttgattaattgaacttgtgatttatctaatcgagagttttctttaatatatatacaagcgttattgatgactgtataagggaataaataagtctcaagaatctcaatcagtgactgagggtctttcgtaatgaagtcttgagatttattatgtacccaatctttcatacgattgaatacttctagctcttttgttgtttttaattcataatctttatacttagaagaaagatttccttctgataagattctataataagttaagtattcatcgacataacatacatttgtcaaactcataagtttaaataaaaactctaaatcttctccccaactacatcctggtgtaaaacgaatgttatgatccattacgatggatcgtttgaaaatccaagtacttgtttgagcaacaacttgatgtgttaggaatgcttttgccatatcacctttaataaagtttgttgtatgttcaaccttctcgcctgtttcttcgtagaaattcatataaccacaatagcacgcgtccatgttgtttttatgcatactctcgatttgtttctcaattttagttggatgccataagtcgtcactatcaaggaaagcgatatattctccgctagcattttcgatacctgtattacgggctaccgaaacaccttggtttttttgatgaacgtattttacttgccctgggtatttttcagcaaggtttttcacaatagaaggtgattgatctttacttccatcatctacaattacaatttcaatgtttttatatgtttgatctagtattgactgcatcgtttcttcaatatatttttccgtgttatacaggggtatgacaacagaaacaagttgcttttgttccatcatagaatttttatctcctcaagttttttatgtcttgcatcatatatacaagccttttggaaggaagaagattacaagaacatctgtataagtttaacgcatataaactttgtaaatcaactttctattgttgtactttgtataaaaagtatttattatagaacgtattgtgttgtaaaaatatagaaatatattttgaaaattatgtatctgaagggagaagatgagatgttagggcgatttactcgcaaatctaatataatccttttagggattattatgatagtcggttttgcacttcgttttgcaactttacaaacacatggtgcagatctatctatagctagcgatgatataggttatcaaaaaacggcaaatattttattggaaacagggatgttaacatatcatgaaccagataaaccaacgattcatattatgccgggttttccagctttattagctgttgtattttatttttttggaaatggcagtgaaggtctttttgtagcaaaattaattattatcctattaggggtacttagtattttgctaacttataagattggtacttatttattgaattctgctgcaggattaataggtgctttcttattagctgtgtatcctccagagattgttatggaaaatttaactttaacagaaggaccgtttctattcctttcattaggattagtatattggagtttaaaattagctgatactcataaaacgaaacatcttctgattgtattaattttctactttttagcactgtacctccgtgtacaaattgccttatatccaatcttactatttgggtatcttttaatgaaacgctacccattccgtattatgatgaagcaagcgattataagcataggaataggacttatcgtacttggaccatggtgggctcgcaattacattcaatttgataaatttatcccactaactgctggggcagggaatccgttattacttggaacgtatcaagggaaaggttacccagaaggtaaggatatgggggaacttgaaatagagttacatgcaaaataccctaatcttgaagcacatgaatttatggaattagaagaaaaaatagcgattgataaaatgaaggaatggtggaaaactgataaggaatctatgatagagagttatttagttttgaagccagaaattctttggaaaaaaccgtattattctatagagcataatattgaagtattcaatgtttctgcaaaggatatgaatgaaatatataattttattaagacgacgtttttaatatgtacagtactttcatttattttccttttaaaaaggtggagagagactacatttttatggtcaatccttttattgcaaacagctttaacatgtttttatgttgcatatgaacgatatgcattaccgttaataccattcttatttattataattggagttgggaccgtggcaactgttatgaaaattagtaaattattaattagaaaaaaatagtttgcaataaaaaacatcttaatttttttaaaaaattaagatgtttttttgtatatgttcatatttaaatagaaaactattctttatcggtttcaggttgcgttacttttaatttttgttttaataacgcataatcttgcgttaacgttacaagttgatgatgtaatttagaaatttttcttgttaagtcaaaaattaatatgaaacagaataatagtccaaataagaataaaacagatggaggatattctacgtgtaatagttggccaatccaatttataattttttcagtagaacttaaaatagccattgcaacacaaacaaaaatccataaaatagcatatttagtttctaaagctccacgacgaatggaattaataattaataaaaataataatagaatgaagataaatgaaaaggtaattataggcatttattatcaacctttcacaattttttgcatcaatatagcaaggcttactttaatcatgtaatatgcagatttaagaggtgtgatagaagattgtcccccttgacgctcttgcatatttacggatatttcattaatgcgtaattttttcttttttaaatgaataaggacttctggttctggataatcttttggataattatgtgcaaaaatcttaattacttctctattgatagcacgatacccagaagttggatccataaaggtttgttttgttagtactttcagtagagcagtaaaataaaaaataccaattcttctagaaatactacctttataggctgttttctctgtaaaacgtgaacctagcaccatatcgcattggtcttcagcaataggttttataattttgtacaaatcatcaggattatgttgcccatcagcatcgaactgaatcgcaatatcatatccattctcataagcgtatttataaccagtttgtacagctgagccaatacctaggttatatggtaagttcacaaggtgaacaggaaaatcatttacgatttgagctgttttatcatgtgatccatcattaataacgcaaatgcttaattctgtaaaatgctgttttagttttaataatcttgttaatgtatctgcaattgcttcttcctcgttatacgcaggaataataattaacgtttttggtattgaaattggtacctcaatagacattatcgcaccatcccttatatacttaattatattatagttatttttaaacgaaccttatctaatataccattaatagtatagcaaaataaaggaaaaactggtggattattttaggagacaaacagtaaataaaagataagaggtggaattttttacaataaaaaatacatgcaaggatgaaataaacctgtgcatgtatgaagtgagagtatcgtattatatattccatggcttacttaaagttaaaacttcagccatctctttactttttaaacgtcccttttttcggttttccgcgcgttctaaaccggttgtgtgtaaccaatgttcttcttcagtttcaggaagtacttgtggtacggatgaaggttttccatcttttattgccacaaatgtaatgaagcaagtagcagcaattctacgctcgcctgctaataagttttctgcgattacttttacgaaaacttccattgaagatttccctgtataacatacaaatgcttcataacaaacagaatcagcttggtgaattggagttaaaaaatcaactgaatcaatagatgctgttacgcaatgtttacgactatgtcttgcagccgcaattgaagcaatactatcaatttctgctaataatttccctccaaaaagtgtttggtgattatttaaatcgttaggaaaaacacgtgttgtcttaattgctttagattctcgcatgaatttcttttccatatattcagcccctatagtctgttttcaatcagaataatatgtgtaagcagattactcatattagatatttaatgaagtaaagtgtattccaaaagaggattatttaaacttctgtatttgtattcatgtaactgaaagaaaatttattttatctaaaatgtagtgtaaaagaggattcgcttacattgcaagtaaaaagtaatgactatgtatttgtcatagaaattccctatcagccgtgtccccattcatgatagaatcgttttgttatgaatggaaatagaggtgcaatggacatatgaatcatatacaaacaaatttttcatctttcttcaataaaattacaatcggtgcgatgctcgcattttttgtttatagttgttgggcagcatttgagacaagtaagcaattttttggaggaagtacaacaagtgtaacaatcatattagcaattttcgtcatacttattttgttagtggcatcaattctacaatatcgttttacagataaacaatttcttatttttcttataagtatatctatagttgtgagggttagtatgctgttatttgtagatgctccaataattggtgatatgaaagtgatgtatgagtctgcaaagcagattgcaattggtaataatatagggactgtaactcatttgccttttattatatatgagtcggtaattattcgtatatttggtgattcattattcgctttacaactatttaatgtgctattttgcacaggaacagcattatttatttatcgtattgcgggaatggtttttggagaagaatgcggtcgtattgcttctatcttttatgctctgtatattccaaatatattcatgagttccgtattaactcctgaatcacttgcaatatttttattttattttgcttgttacatacttttatataaaggattagatcatccttatatgtgggtgttttcagcgattttatttgcatttagtaatatggttttcccaatgggattatttcttcctatttttattacggtatatgtattattaatcgaagtatttcaatcagcaacgaaacaaaaggtgttactaaaaatgatagggatacttattctattttatagtgcccattttagtgtgaattatggaattaaggcaatgggattgtcacaatatacgatttcaaatgagacgtatgttcaatctgttttaattggaaagacgcaacatgaagaaaaaatatcgaaaaatcaaagtgtaacagagcatattgatcaaaagttaaaagagattgagggagaaagatttaaacttttagagccgatgataaatcagttttcagatgaaggggtaaattctattcttttcaaatgtgaaaaactgatatatatagccgtaacattgtttatgactatagctctattacacttccttattaagaaacaacaaaatgagggatatatgttgttcttatttttaattagtggctacgtattgttaaagctctttcaagtagatatggcatattacaatgtaattatgccgtcattgttcattttgcagagctttggtgtttatatgagttatgtgtattgtcaaaaaatatttttcagaaaataaaaagaatccattctggattctttttttgatggaagatgaaatttagtagtcagtgcagatgaaaagtatgcctgacttgaatttgatcccgctattttccaggcagtaagacccccacctcaaaatcagcgaaagcaaagaagttaggtggggggcgggctgcccgtaaaagcccgattggtgagggctgataatcaacgggggatgaacaaaacctccgttgattaaagtttcactttatcttatcgatttagttctagttgtaaattatcggctgttagagccatttgtgaggaatcatcttgaattcctttcattacttgtgaaatagcttgtagctcgtgttcaattttcttattctgttcttttgagttagacatatcttttacaatttcttggaagtatcgatctgttgctgacatactatccgttccttccgatacgagagagctaatttgtttcacggaagacgagacacgggtaatttgttcatttgttttttcaacgagctttgtaacgttaaatatagattctttcgtttgctctgataattttcgaatttcaccagcaacaacagaaaaccccttcccaaattctccagcacgtgcagactcgatagctgcatttagtgcgagtaaattggtttgctccgcaatcgatttaacaatatctatgatttcattaattttgttagaaatattaaggagttcatgagtatctgtaataatcgtttccatattcatttgaatagatcccattcgtttgttttgctggtttaattgttctttccctttattggctttttcttcagatgttgtagctaatgatgtacctgttttagcaatctctacaatagtttcagatttggcggttagtttttgaatagaagagcttgttttttcagatacagcagctagttctgttgcgatatgcgtaattgtcatagcagttagttctttttctttctcatgctctttttgcattctttcatattcagattcataagctgcaagaacaagttcttgttcaagagtaaataatttatttataacatttatagaataggaaaaatcatcgattgttgttatttttgtttgcaaaatcttcatgatagagcggaacaattcttgataagcagcagtataccattttcgatgtaaaccaatttgtacatgccttttggcaatcctaacacgctgttcaataaaatcttcatgcatattgccgctgaataattctttaatatgtgtttttaaagtttgttttagttttggaatagagctgtaacgttcaataatagtaattaaattaggttgttttgtaatgttggcatagaatttttcagtaatccaatcaatttctgcataaataaaaggctgtagtacttttacaacttgtaaatcttcttttgaaatatgtagcatatccatttgaatttttaattcagaattagtagggacattaaaagttatttgttggtccttacttaattcgattatactggcatttgttttattaatattttttttgaaaaccccaagcatcattcttccccctgtatataaaacgttttcaattttaaaactaatatagagtaattatatatgcttatatataattactctatattagttcgttgaatagtatataaattaagagaattctatctagaattctcttaatggcctttattaattttagcatgtgttttaaagaaaacagggaaatgaacattatatattacagtgacgacacgaataatgaatgttactaataaacaaacatagaaagctaacacgtgcgcccccatagcgtgtgtgattaggaagctaattgctcctaagatagaagcgattgcgtaaatctcttttcggaatacgtaagggatatcttgagcacaaatgtcacgcaaaataccgcctccaatacctgtaatgactcccattgaaacaactagaaatgaggcgtcaacatgatgtgacattgccgcatttgcaccaatagctgtaaaaacacctaagccaacagcatcagaaagcataataacgacttgaagtttattgatgcgctcaaaaaacatgcaagtaaataatgctgataatacacttacgaaaaagtaaatgggttttacaaatgcgacagggggcaggttaccaatcatgatatcacgaataataccgccgccgagcgcagtagctacagctaaacaaaggacaccaaataaatctaaatctttttttaaaccaactaatgtaccagaaatggcagcggcgataatgccaagaaacgtaaatatatcgattaataacatggccttaatcccttcctcttaaagatgttccagagaaaaaatatacactaaagtattggaaataacaattacttttcgctacatgtagaaaaacggataaaattcataaagaaagcgtttgaaaatgtttggaaaatagccataaagtaatttgaaaaagatatgaaaagattaattttacattttttgatgttgtttatttggtaaaacattacaattataggtaggttatttatatttgtataaaatgataaaaaaatatttatatactgacaaaaataaggggatggttgttagatagattttataaaaataggggagtatagctaaaggacgataatttctattactgattaatacttgtcctggctagttttagctggaaaaatagttctcgatttgaatatgagttatgttataattgctaggtgtgtttgaatgataaaaaattatgattaaaagataatgttaagattttgtatggaggtcttggaatgttagcaaatcaagctagggttagatttgagcattttttgctcttttttattattttacagcctgttttagatttattaacgtctcttagcatcactttattaaagtcaaatgctaccgttggaattttagtaagattccttattatggctgttggtggtatttacattttaattcaggcaaaagagaaggaaaatagaaagtttttaatttatcttatattgttagccggagttttaggtataggatttattaataacaaactagttaaggatcctattgtacttagtgaagaggttaaattcgttgcgaaagcattatatatatatatcatgctgggatcatacattttagctttaaaatcattgaaaaagacagttaatattagtgataaggttcgaaatagtattgtatattctacattaatcattaacgcaattatggttatttctatttcaacatctactgactttggtagttatgaatggatgaaggttggttctcgaggttggttctatgcagggaatgaactaggttcaatcttagctattattttccctattgtagtactatattctatccaaaaaacaaagagctggaaacacattctatattggattccatcacttttaatgatttattcgctaattcaagttggtacaaaagtaggaatgggctcaattggtgctacgctagcggcagcaatcgggattattttactacaattattatttgatagaaaaaatccgaacaaaaaatcccttgcacttaatgcagtaattgctattgtcctattagctggtgtagtcggaacgtttaaacaaacgccattagcacaaaatatgggtattcacaataattatttatcagagcaaaatgtggcacagcaaggtcaaaaagaaaaagaaattaaagagaagctgaaaaaagagcaagaacttaaagcaaaagaagaaaatcatcataaagttgaaaagccagaagaaaaggcgaagatagaagaggaagttaagaaagagcttgagaaagagcaaaagaaagaaaatcaagaaaatcttattttcagtggacgtcaagtatatgaagaaagacataagcagttctttaaagaagcgccaatgtcacaaaagttattaggaatgggttatgcaggtaactttaaatacaatgaacaaaagcagccagatccaaaactaattgaaatggacttccatgattggttttatgatttcgggattattggctttgtattactaatgattccatttatttattacgggctaagaattctactagcatttgctacgagatttaaggacatatttaatataaaatatggaatgatttcagcaagcttattgttagcgttaggtattgcttatattgcaggacatattttaacagcaccaggagttgggatttactttgtagtggtgttagcttatctaatagtagacctagaaattgaatgataaaaataaaagctaacttttgttagcttttattttttagtacagtaaaataaaaatagatggaaacgtagcgaggatttaaaggaggaaaaaatatgaaaatattgcatatgaatgcaggagcagaagatgggggagggaaaacacatattatttcacttctcgatcagtttccaactggtgaagtagaattagcagtatttgaagatggaattgttgcgaaggaagcaagggagttagggataaaagtccatgtgttttcacaaaaatcgcgctatgatttatccattttaaagaatataagtgaatttattaataaagaaaaatttgatgtagttcatacacatggccctagggctaatttctatgtttctttaatgaaaaagagaataaaggcaaaatgggtaacgactattcatagtgatccatttcaagactttactaaacagggcttaaaaggttggatttttacgaaattaaatttgaaagccttaaaaaatatagacttatttttcgttgtaacaaatagattgaaaaaaagcctggcagcattaggtatttcaaatgaaaagatgcatgttatttataatggaattgaatacgataaggaaaaagcagaaggctataataaaaaagaaatgttcaatattgatgaagatgtatttacggcaatccaagtagcacgattacatcctgtcaaaggacatgaagttttattcgatgcgttacaacaaacaaaattagagaaaattaaagtattattagttggcgatggcccattagaagaaaatctaaagtcattagctactgaaaaagggattaacgataaagtagagtttttaggacatcgtcaagatgtaaaacaattatttgcgtcgtcacatgtaaatttattaacttcccatagtgaagggttcccactagttttattagaagcggcaaatcaacgcgtaccatcaattgtgactagggctggagaaattgaaccattaatcgtagatgaaacttacggatggattgtgccaacaggtgatggaaaggcattagcattagctttagaagaagcgtatgataagtggaaaactggagagttagcagcaatgggtaaacatatttatgagcatgctactatgaacttctcacttcaaaaactatatgaagatacaaaggaaacatataagcaattaatagcgaaaaacttgtaatgatagagaggatagttaactatggcagtacaaacagttgatattctaggcgttcctttttctacaatgacaatggatgaaacggtccaatatttaaaagaacaactagaagcggagcgaactcatacgtttcaggtagtaacagcaaaccctgaaattgttatgtgcgcaaaaaaggatgaaaagttctatcaaacattattgaatacagatttaattacacctgatggtattggggttgtaaaggcaagcgggatgcttggtacacctttaaaagaacgtgtagcaggttttgatttaatgtgtaatttacttgcgaagttatcagaagatagtaagccggtatctgttttcttattaggtgcaaagccgcatgttgtacaagctgcagcagatcatttaacaaagacatattcagctgtatccatcgccggtatacaagatggttattttaaacaagaagacgaagagaatattatttctcgcattcaagaagcaaaaccagatttattacttgttgcacttggtttcccgagacaagagaactttatacaaaacaataagcagcgtttagaaacgaaaatggctgttggagtaggtggaagtttagacgtatgggctggagaggtaaaacgtgcaccaaaatggattcaagcaattcatttagagtggttttatagattatgcagtaatccaacacgctggcgtcgtcagttagtattagcggaatttttaaaagaagtagtgcgttcgaaaaagtagcgaaatatcgctgctttttttatttgttcatttttaataaattgaaactttaatcagtgaggcatccccacagattattagctctcaccaatcgggatagacgttttactttttgggaatgatgaaggagaattttttacacaaaagtattttacttatacaattcacacatgtaaaatgatgtgtaaagacacctgtgtgaggaggacttctagtgggcaaggttaaagaaatttcgaagcgcaaactactaggtatagctgggcttggatggctatttgatgcaatggatgttggaatgctttcatttgtaatggtagccttgcaaaaggattggggattaagtacgcaagaaatgggctggataggcagtattaactcaatcggtatggcagtaggagcgcttatttttgggatactatcagataaaatagggcgaaaatcagtctttattattacattattattattttctatcggtagtggtttaactgcattaacaacaacacttgcgatgtttctcgttttacgctttttaattggtatggggcttggcggagagcttccggttgcctctacactagtatcagagagtgttgaagcgcatgaacgtgggaaaattgttgtgttattagaaagtttttgggcaggtggatggctaattgcagctcttatctcgtattttgttattcctaaatatggttgggaagttgcgatggtattgagtgcagttccagcattatatgctttatatttaagatggaatttaccggattccccaaggttccaaaaagttgaaaaaaggccatctgttattgaaaatataaaatcagtttggtctggggaatatcgtaaagcaacaattatgctatggattctatggttttgtgttgtcttttcctattatggaatgttcctttggttaccgagtgtaatggtgctaaaaggatttagtttaataaaaagtttccaatacgtacttattatgacattagctcaacttccaggatatttcaccgctgcttggtttattgaacgtctcggtcgtaaatttgttttggttacgtatttaattgggacagcttgcagtgcttatttgtttggggttgcggattcattaacagtattaatcgtggcaggtatgttactatccttctttaacttaggtgcttggggagcattatacgcctatacacctgagcagtatccaacggttattcgtggtacaggtgcaggaatggcagcagcatttggtcgtattggtggtattcttgggccactattagtgggatatttagttgcttcagaagcttcactatcattaatatttacgattttctgtggatcaattttaattggtgtattcgctgtaataatacttggacaggaaacgaagcaacgagaattagtataaagtgaaaatttgaacgtatccctgaccgtttattatcctacactactcggctctttataggcagttagtgcgggataaaaggggagaggaaaccgaagtggtttccttttttctgtttttttagataaataatggtatagtaagaaaaagggattatttcttataaaagcgaatgtatacaacaggacatatggacaaagaattaggtggttgaagaaatgaaaattttactgatcatggaagaggcagaagagagaagagagttagctgaaaatttcactgaaaatatgagaaatgtagaatgttttgaagcaaagacaggaacagaatctttatttatgatgaaaaaacatataccagactttgtttttttaagttccaaattactagatggtactggttttgaatatgcaagtttattacgagaaataaattgctatacaaaatttatttttgtaggtgaaaacatagaagaatctattacagcttttcgtttccaagcattttattatttattgcgaccatttcgtgaagaagatttacaatttcttttatataaaataggtaaagaacaaggtgagaaagcaaagagttatttgcgaaaactaccgatagaaagtcaagagggtatacgatatattctcccagaagatattgtatatgtaagtaaaaataaagaaaataaaactgtttcaatttacacaacgaataatcagtatatttcaacatatacacttcaggaattagaaaataagctaaatgcatatgattttttacgtgtacataaaagctatttaattaatatgtcatatgtaaaagaactgaaaccttattataatggcacgtataatttgtatttagataggtatgatgagcaaccgattccagtcagtcgtaattatgtaaaacgccttcgaaataacattgaattatagtaggtaatgagagtattttaacatgataaactgaaaatccttcatgatagggaggattcaagttaaatattcagaaaatttagtacaatctccactaagaaatagtattgggggaattgtatgtgaagacattgaaatcgatcttactttggggcattattacagcagtaggagcaggtgcttttggggtagtagctttatcacaaggtgaaaccattaatgctgtatggctcttagtagctgccgtatgtgtatatgcagttgcttatcgcttttatagtagatttatagcgagaaaggtttttaatttagatgataatcggcaaacaccagcccatacattaaacgatgggaaagactatgttccaacaaataagtgggtattgtttggacatcactttgcagcgattgctggggcgggacctttagtaggaccgattttagcagcacaaatgggatatttaccaggaaccatttggattattgttggggtagttgttgcgggggctgtccaagattttgtcattttatttgcttcgatgagacgtaatggtaaatcgttaggagaaatgattaaggatgagattggacctgttacaggactaattgcaatgataggtattttaggaattatgattattttattagcagtattagcgttagtcgtagtaaaggcactaatcggaagtccttggggaatgtttacgatagcagcaacgattcctatcgctattttaatgggagtttatatgcgctatattaggcctggtcgtgttggagaaggatcagtaattggtattatcctacttattttatctcttgttggaggacagtatgtagcagaaaatccaacacttgcaagtatgttcacatttagtggtgaaacaattgctattatgcttattgtatatggatttatcgcatcggcattaccagtttggatgcttttagcaccacgtgattatttaagtacatttttaaaagtcggaacaattgtagggttagcaatcggtatcttaattgtagcaccagatttacaaatgccagcagtttcgaaatttattgatggaactggtcctgtgttttctggaaacttattcccgttcttatttattactattgcttgtggtgcagtgtctggattccatgctctcgtttcatcaggtacgacgccgaagatgatcgagcaagagggacacgcacagccaatcggttatggagcaatgttaatggagtcgtttgtagcagcgatggcgatgattgcggcttgtgtattaacaccgggaacgtattttgcaattaatagccccgcagcacttatcggtacagatgtttcgcaggcagctcaagttatttcctcatggggatttgctattacaccaaatgaactaaaagatctcgctgtaaatgttggagagcaaacaattttatcacgtacaggtggtgcgccaacattagcgataggtatggcatatattttctcacaagtaataggtggaacggccatgatggcattttggtatcattttgcgattctctttgaagctctattcattttaacaacaattgatgccggaacgcgtgtcggccgatttatgattcaagatattttagggcatgtatataagccatttgggaaaacggattctacattagcgaatgtaatcgctacaacattatgtgtattagggtggggatatttcttataccaaggggtaatagatccgctcggtggaattaatacattatggccacttttcggtattgcaaatcaaatgctagcaggtattgcattattacttggaacgacaattttgttcaaaatgggaaaaaaggcgtacgtttgggtaacacttattccaactgtcgggttgctgattgtaacgatgacggcgggatatcaaaagctatttcatgaaaatcctaaaattggatttctatcgcatgcaaaggtatttcagggagcattagatgagggaaaagtgttagcgccagcaaaaaatgttgctcaaatgaagcaaattattttcaatgattatatcgatgcggcgctttgcggaatttttatgatagttgtaatcgctgtgttaatttcagcacttcgaatttggatccaagtattaagaaataagccaatgccgttaaaagaggcaccatatattcctagagatgaaagtgagtcgaggaactatgcttaaaaagttgtggcaagtatggggtgaaagaaaacgctttattagtttgctcgttggggtaccaagttatgaagtatatgtggagcatatgaaaaagcatcatcctgaagaagaggttgtatgtcaaaagcaattttttgctgaggcacaagaagcaagatttaatgcaaagggtggaaaaatatcacgctgttgttaatgaaaaagggcgagttttcgccctttttatttttttgctgtttcacgtggaacagcaaaaataaacaaaatatttgggaattaaaggtatttcgtatacaataaggtgaggaaggggatagatggaaaagtagggagattattttatgttaagggacttatttgtaaatacaacaattattctttcctttatttttattggaggtcagcttttaagggataagccgttaaaagaaggattctcttttgggcagaaatgtgtagtaggcatttttactgggatactaggtatagtattaatgtatttcagtgttcgtgttggtaccattctattggatttacgctacttagctgttattctagctgttattattggaggaccgatagcgagtaccataacaattggtatgattttagtaactaggctgttgtttatggattattcattagcttctcaagtggctttttatacaatcattgcgataggaatagggagtatctttatttcgcgcatgaagctttctttagggggaaagtgggtatggttacacacatatattttatctattctaatcccagcgttatatatatggttaattaaagagatccacatagtgggattatatttaatttctagtattattacaggttacataacattcataagtgcaaattatgttttacaatccaatgagttatttcaaaagatgaaacaatacgcaacgatagatgcattgacaggtttaggaaacgtaagacagtttgatttagagatgaatcgtcatattagtaataagaacatgaaaaatgattcgttttgtttactacttatagatattgaccactttaagtatgtaaatgatacgtacgggcatcctgcaggggacgaagtgctaaaacaagtaggatgtattttacgagaaacttcacaatttccagatttggcttttcgaaagggtggagaggagtttgcacttttgataccgaataagggattagcttacggaattcttacgggcgagcaaattcgtacagctgttgaaagtcactcatttcaattgttagatgaaacgaaaataaaaattacagtttcggtgggggtttcagaatatgaagaatcaccggagcaatttattcaagcggcagatgatgcgttatactactcgaaacgaaatggtagaaataaggtcagctctgtatcttaaagataagatgaccagaagacataaagcttataaaaaacactcacagaggcaatgtatgaactttgtgagtgttttttatttatatattagacaagttcttttgatacaacaaatttacgatatgcaccatggtgagttggacctacgtattcgttaattttgaatgagtaacgaatagcagctgtgatgaattctttagcagtttttactgcttctttcacaggttttccttttgcaagttctgctgtaattgcagcagaatatgtgcaacctgcgccgtgtgtatttgtcgtatcaattttttctgattctagaaggtcgaatgtttctccatcatataggacgtcgattgcagtttccgtaccaagtttgctaccgcctttaattaggacgtatttcgcacctaaagcatggatctttttcgctgcttctttcatgtcttcaagagaattaatctttacgccacttaattggtaagcttcaaataagtttggtgttacaactaatgcctttggaacaagaacgtcacgtaagcaatcattcgtttcaggatgtaatgcttcatcagcacctttacataccataacagggtcaactactacatttttgaaattgtgcttttcgattgtttctgcaaccatttcaataatttctactgatccaagcatacctgtttttaaagcgtctacgccaacaccttcaattgttgtttctaattgtggttttaatgtagaagctgggattggaaatacgttatgtgcccaaccgttatgtggatccatcgttacgattgttgtaagagatgtcattccgtatacgcccagttcttggaatgtttttaaatctgcttgtataccagcaccgccacttgtgtcagaaccagcgatagtaagtgctttatttaatgtcattatgaaagccccctcgagtgatataatgaaaactatgttctcaccattatatcaatgttacgaataagtacaaagtgaaaagtagatgatttattttaagagctatttaaaatcttgtatgcaggagactgagtatgtttcgagataatcgtacaaatgaattagttatattaaaggaaattgcagaaacattaaatacatcaaatgatacatatcatgtattgcaagctgtcctagagaaattactaagtgtaacaggtttaacgacaggatggatttttcttgcggatgaaaatgggaagtatacgaagttaattgattatcaattaccagaggcacttacatatgaaaataaacgcccgatgtgcgaaggtgaatgttggtgtttacgaggttttgtagatggaaaattagagagagccgttaatattattgaatgtaaaagaattaataatgcaattgaatataattggggggatacggagggcattcttcatcatgctacggttcctttaaaagctgggggagaaaaatttgggttgttaaatgttgcaagtccgggtaaaacacatttttcagaagaagaattagtattactccaatcggttgccttccaaattggtacggctttaaagcgaacaaaattatatggaaatgaaaagagaagagcacattattatgtgaaattagagcgtttcattcaagacttaaaaacgattcataagtttaatgtactacctgaaaaagtggtaaatcacgtaggtgaagtatttcaatggaatcaagtagcgctttttattagggaggaaaaagaattatctctgcgagcgtcttacgttcaggaagagttaaaagaggatataaaagaggcggccaagagggcgttagaacaagatgaaccagttctaataaaacatcaaataggacataatgtacatctaaatcgagctgttattgctacaccaatacatattcaaaaccatatatttggtgttttatgtgttagcctgaataatggagagtttgatgctaatacaatagacgtaattcaagcattatcgaaccatgtttcgttaataatagagaatttgaggttaaacgagcagcgccgtgaacttgtgcgaatggaagaaagaaatcggttagcaagagatttacatgattctgtttcgcaaaaattattttcattaaccttcatgacaaaaggcgccgaggcagttttaaaaggtaaaaatgaaaaggtagatcaatctttgcatgagatgcgtgaacttgcgcaaggagctttgaaagaaatgaggacattaatttggcagcttcgtccggcgggattagaaaaaggattattgccagctctaaagcagtacggtgaaaatttgggactgaaaattagggagcaagttacgggtgttcgtgatttacctcgtgtagtagaagaagctttgtggcgcataggccaagaagcactgaacaatgtaagtaagcatgcaggtataaaagaagcgacgatttattttacagtgaatgagaaaaatgtatcattagaaatagttgatcaaggaaagggatttgtggaaaagaatataaaagaaaagaaatcactaggtatgactacgatgcgtgaaagagtagaattagttggtggaacaattaaaattgtaagtagtaataaacgaacgagcgtaaaagtaaatgtaccattatgatgtgaaaatgagggaagtttgtgaaaataaaagtattgttagttgatgatcatacagtcgttttaaaaggattagcatttttcttaagtacacaggaagatttagagttagttggagaagcgaataatgggaaagaagcgttagtgaaagtaggagaaacaactcccgatgttatattaatggatttatacatgcctgaaatggatggtgttgaggcgacggcatatattaaaaaagagtatccaaatgtgaaagtaattgtattaactagcttttctgatcaggcgcatgtgttacctgcattaagggctggagcaagtgggtatattttaaaagatgtagaaccagatcagcttgttgaggctattcgaagcgcatataaaggtaatattcaattacatccggatatagcaaatgctcttctctctcaaacattacctgtagaagaaaaggaagaagaaccttctattcaagtggatgtgctaacagcgagagaaaatgaagtattgcagctattagcgaaagggatgagcaataaggaagttgcatctgttttagttattacagaaaagacggttaaggcgcatgtaagtagcattttgagtaagttgaatttatctgatcgtacgcaagcggcattatatgcagtgaaaaatggaattgtataagacgaaagtcgtaagaccaagttcgcctttggaaggtggactttttttatggaaaaatacgtctatgtgaggacgaaattgtcattatataaagataaaatatgtttgtaagcaacaaaacaacaattacaagggataccttttttgaaagcatataacaacataagagtgagtactaggaggaataaataatggcaacagttttattcgttaaagcaaataaccgtccagcggaacaagcagttagtgtaaaattatatgaggcatttttagcaaactataaagaagcacacccaaatgatacagtagtagaacttgatttatataaagaagaattaccatatgtaggcgtagatatgattaatggtacattcaaggtaggtaaaggatttgatttaacagaagaagaggcaaaagcagtagcagttgctgataagtatttaaatcaattcctagaagctgataaagttgttttcggcttcccattatggaacttaacgattccagcagtattgcacacatatattgattatttaaaccgtgctggtaaaacgttcaaatatacgccagagggtccagttggcctaatcggagataagaagattgcattattaaatgcaagaggcggcgtatattcagaaggtccagcagctgaggtagaaatggctgttaaatatgtagcaagtatgatgggcttcttcggcgcaacaaacatggaaacagtagttattgaagggcataaccaattcccagataaagcagaagaaatcattgctgcaggtcttgaagaagcagctaaagtagcaagtaaattttaattaaaagtataatcgtcactcgaaaaaacagcattaacatgtaagcgttaatgctgtttttttatatttttagttcatcagcaagtttttctaatgtatttcgatcttgtatataatatgttcggccttcttttcttaaataatttagttggcaaaactgatttaatacatataaaagatgacggtagctgacatttaaatattccgaggcctcggtatgcttttctatataacaattattttgctctgttaataaaataaaagcagctaatcgattttcaaaaggataactatagttttttgcgtgattttcagtgcgagtaattgtcttttctccaataaatttacataagtgctgtaaaaacgttgcatcttgtaataaaagttgctgacaatctttaagaggaagtgccaaacacacacaatcttctagtacttcaacggacttagtaatattttctactcctattaatcctaattccccgataaaagatggtgcttgaataaaattaattaatgaaaccttcccgtttttatgactcatatatatttttgctttcccagaaattaagtaatagagataagggagagcatttccttcgctacatatcatctctttcgtttgaaaagaatgcagctctacatatggcaagacatgaaatgaaaatagggtatggaattgatggattcgcatgtattgataaatttcttcctcatttttgctgattttcatattttcacccccatgtatagtatgagatatctcctattatctttacaagaatgaatgatacgatttatgtaaatttgtttttgtagaaaagagagtgtgatgaatttatgaaaaaatataaaacattgttatttgatgtagatgatacattactagatttccaaaaggctgaaaaagtggctttacgggtgctttttgaagagaagggaatccctttaacagacgagatagaggctcgttataaaaaaataaataaaggtctttgggatgcttttgaaaaaggagaactatcacgcaatgaagttgtaaatacaagattttctctgttgtttaaagagtatggagaagaagtagatggaatattattggaaaataattatcgtaactacttagaagaaggaaatcaactcatgcaaggtgcgtttgaatttataaatcaaattcaaggagagtatgaattgtatatagtgacaaatggtgtttctaagacgcaagataagcgtttgcgtaatgcaggtttacattcattatttaaagatgtttttgtttcggaagatacaggttttcaaaaaccgatgaaagagtattttgattatgtttttgaacggattcctaactttgcacctgaagcagggctgattattggggattcattaagcgctgatatgaaaggtggatatgtagcgggaattgatacttgttggtttaatccagaaaggaaattaaatgatagtgggattataccgacatatgaagtgcataattttgaggagttagaagcgttattaaagcagcatgtgtaataaaaaaataggcagtggagctttcatccccactgcctatttttattaatttttattttcgttatgttttgggagcggaaaggcattcccgatagcagctgcaccaagcatgggcaatagtaaattaagcgggaaaaacataagtaatagtaatgttatagctattggctttcgtaacgcatagcttgaaattgctgtcgttacgatggcaacagatgctactggatctataggaagaatagatgctacagcgtatccgatacttgacccggaaaatataattgggaagatatgtccacctcgccaccctgtgttcaaacaaacggcagtaatgcacaactttaaaatccctgaaagaagtagtatccaaaaagataaatggctccattcaacaactaattcttttaattgatgctcacctgaaaataatgtgtacggaagaaaagttcccgcaattcctaataaaataccaccgataattccgagtgtcagtttgtattccctaaaagggtgaattaacttctctaatgtgaattctaacttgaaataaaagaaaccaactatagcaccgatactagcaagtggaagaaatgcgatccattcattgaatgaaagtgcaccttccccgaaatcaacaataaaggatccacgattatcgagtttactcagtagtaaataaacagaaaaacctgcgaaagtagtagctaagtatacaatcgccttttttcctttagaaaaagcagcaatttgttccccctcattttcatttggtgctaaataaccgaataatggtgcgttaaaaatgacacttaaagtagctccaattccgatctcggttagctcattcatactctttaaggcaaatttaaagcgatcccctacccatgtgcacagtccgcctataattccaactagtgcggcttctggaccaagactagcaccgaaaattaaaacaataatcgctgttaaagtagcctgatggacaaagcgatattcgattcgaccagtttttttatattcagccatcacttcaggcataaggcgtgggtatgtaccgaaatgtttttgtgatagaccaacaaggaccccgccaattattgttacgcaaagggtgtaataagagggaaaagagagaacttcaggcaagtatccccaaataaagtggattccaatatttattgtgactaaaaataaccagactgtagctcctactatagatcctagaagaatgccatatagagcaagtatgtactgcatatcttttttatttgtcatgttatacctccgttatgtaaatcttagtaggtaaaaaagtgaaatatactagtgaaaaatggattgaatatatatagtatctttttgaggagatggcctattcaacatataggttaactttaggggaatttgaatttataggttaaattacttatttaattttatagactgatttgaggtttttaaaggtcttttttgaaatagactagaatatatttcttttgttgctttatatgaaactgttaacatttattttagaacattcagaaaaaccgtttgacattaggaaattattgctataaaatcaacggtaattgcatagtcttatcaagaaaaggtggagggacaggcccgatgaaaccttggcaacagccgtataacggaattgtgccaaatcctgcaggtagtaatcctgagagataagaaagagcctttagagcgtgttttcaaactgctcctttcttgttttcaggaaaggggcagttttttattttgtataaaagaaaggagaatgagagatgggagaatcatggggaaaaggaacaatttgtgtgcaaggtggctatacgccaaaaaatggtgaaccacgtgttttaccactttatcaaagtacaacatataaatacgatacttcagatgatttagcagccctatttaacttagaggcagaaggatatatttatacacgtattggaaaccctactctagccgcatttgagcagaagttatcagatttagaaggcggtgtaggagctgttgcaacggcttctgggcaagcagctattatgctcgcagttttaaatatttgtagtagtggggatcatttactttgttcttcaacggtttacgggggaacgtttaatttatttggagtgagtttgcgtaaactgggcattgatgttacgttctttaatccaaatttaacggcagatgaaattacggcgcttgctaatgacaagacgaaacttatctatgcagaatcgttaggaaatccagcgatgaatgttttaaattttaaagaattttcagctgctgctaaagaattagaggtaccttttatcgttgataatacattagcaactccttatttatgccaggcgtttgaacatggggcaaatattattgttcattctacgacgaagtatatcgatgggcatgcgagctccttaggcggtattgtaattgacggtggaaactttgattggacaaatggaaagtatcctgaacttgttgaaccagatccaagttatcacggtgtaagttacgttcaaaactttggtgcagcagcgtatattgtgaaagcacgtgttcagctattaagagattatggaaattgtatgagcccattcaatgcatatattagcaatattggcttagaaacattgcatttacgaatggaacgtcatagtgaaaatgctcttgcagttgctaagtggcttgctaatcatgaacgtattgaatgggtgaattatccgggcttagatagtaatgaaaattactcattggcacaacagtacttgaaaaaaggtgctagtggtgttttaactttcggtattaaaggcggattagaagcagcaaaagaatttatcgcaaatgtaaaactagcaactcttgtaacacacgtagctgatgcacgaacttgcgttatacatcctgctagtacgacgcatagacaattaaatgctgaagatcagcgtttagctggtgttacatctgatttaattcgtttatcagttggtatagaagatgtttctgatattattgcagatttggaagcagctctagttgggggcaaaacacatgccgatcataattgataaagatttaccggctcgcaaagtgttacaaaaagaaaatatttttgtaatgacgaaggagcgagcggaaacacaagatatacgcgctttgaaaattgctatattaaatttaatgccaacgaagcaagacacagaggcacaattacttcgcttaattggaaacacaccgttacaattagatgttcatttgcttcatatggaatcacatctatctcgtaatgtaacgcaagaacatttaacaagcttttataaaacgtttcgtgatattgaaaatgaaaagtttgatgggctcattattacaggagcgccagtggagacccttgcttttgaagaggtagattattgggaagagcttaaacatattatggagtattcaaaaacgaatgtaacatctacgctccatatttgctggggagcacaggctggcttgtactatcattatggtgttccaaagtatccccttaaggaaaaaatgttcggtgtatttgaacatgaagtttgcgagcaacatgtgaaattgttacaaggatttgatgaattgttttttgctccgcattctcgtcatacagaagtacgagagaatgatattagaggagtgaaagacttaacattgttagcaaactctgaagaagcaggtgttcaccttgttattgggccagaaggaaagcaagtgtttgcccttggacatagcgaatatagttgtgagacgttaaaacaagaatacgaacgagatcgtgacaagggattaaatattgatgtgccaaaaaactattttaaacataataatccagatgaaaagccgcttgttaggtggaggagtcatggtaatttattgttttctaattggttgaattattacgtgtatcaagaaaccccttatatattgtaaagaaggattgtgtaacacgtggcaacgttttccttgtaaagattaacctttatttttccgaatgttcaaaatacattgtttttcagattttttactcatataatttcatctaaacacaatttttgaggggtggacagtactatgaaagaaattcaagttgggttattaggtcttgggacagttggcagtggtgtggttcgtattattacggatcatcaagaacgactcatacaccaagtaggttgtccagtgaaggtaacgaaagtattagtgcaaaacattgagaaagagagagaggtagaggtaccttctactctattaacacaagatgcaaatgaaattttagataatccaaatattgatgttgtcattgaagtgatgggtggcattgatgatgcaaaatcatatattttacaagctttaaaaagcggaaagcatgttgtaactgcaaataaagacttaatggcattacatggagctgaattattagcgacagcaaaagataataaggctgatttattctatgaggcgagtgtggcagggggaattccaattttacgcagtatcgtagaaggactttcctcagatcttattacgaaagtaatgggaattgtaaatggaacgacaaattttattttgacgaaaatgtcagacgaagggagagcatataacgacgtgttaaaagaagcccaacaacttggatttgcagaagcagatccaacatcagatgtagaaggtttagatgcagcaagaaaaatgacgattttagctactctcggtttctctacaaatgtagagcttggagacgtgaaagtaaaagggattacctctattacagaggaagatattgaatatagtaagagcttaggttatacaattaaattaatcggtcttgcaaaacgagatggtgaaaaattggaggttacagttgaaccaactttacttccaaatacacatcctcttgcggcagtacaaaatgaatataacgctgtgtatgtgtacggtgaagcagttggggaaacgatgttttatggaccaggcgcaggaagtttaccaacagcgacagctgttgtttcggatttagttgctgtaatgcaaaatattagattaggggtaacaggaaatagtgctgtagtcccacaatatcaaaaagtattaaaagagccagacgaaattgtcgtgaaaaagtttttaagactgcatgtaaaagacgaaattggtgtatttgcaaaaattacttcattgttctctgagcgcggagttagctttgagaaaattattcaaatgccgcttgaagagaaaggaaaggctgaaattgtaattgtaacgcatcgtgcgtctcttgctgattatgattatattctacatacgttgcaagggtatgaagaaatagattgtttgaaagcgaactatcgaattgaaggggatgctaagtagtatctcttaccataaaacagaaagagcctattaagcagcttgcttaataggctcttttttatttaaaatctgcgtaccaacttgaataaatgcttggataatccagcctgttgtaaaggataagatgattgttccaaaatagataggtccatctaataaaaagcttaacgttaaaaataaaaaggctaatgaaatttctgttcttctaaacgtccattttttcttctcagcaaccgtcaaaacgaaagcttcttgaggcgccgcgcaaaggtttgtagagacgtaaagaccaatcccagctccaacgaatagatttccacaaataagtgttatatattttggaagagagcggatagcatccataatagttgtaatggaaccaatccaatcaacaaaaagcgaaataagaaccatcgttacaatggtaccgatcgtaatttgttttttattccaaaagagtacgataagagtaaaagcaaaattaatcatgaaaatccaaaaaccgatacttatcccgaaattttgatatagtgcaataaagaaggaatcataagggctaagtccaaaggaagtaattgtcgtcatcatattaataccgatggcgagagtgagtagaccgccaatgaaaaatatatattctaatttgaatcgaagcatagttgtatatcctttcaaaatgtatttgctaggaaaggatatattgtggaaagcttaccaggtcaagggataatttttgtgagaaggggaaaatgagatgacaaatataagaaagattgctgaacttgctggagtatctgtttcaactgtttcacgtgtactaaataatcatccgtacgtaaatgaacagaaacgaaaagaaattttagcaattatagaagaattaaattatacgcaaaatgtgaatgcaattcatttagtgaaaggaaaaacgaatgtcattggcgttttattaccgcacgtaaatgatcaatattatagcgccattatcgagggaatatcaaaggaaacagcaaaaaacaattataatatgatgctttgtcagacgaattatagtgaggaaagagaattagaaattttgaatatgttaaaaatgaaaaagcttgatggggttattatatgttccagggcaaatagtaaggaaaagcttgaagaatatacgaaatttggtccgattgttatgtgtgaagaaatagactcgaatttcatttcgagtgtgcatattgattactataaagtgttttcgcgcgggatgaagagcttaatagatgccggccatacaagtattgggtattgcattggaagaagcaatagcattaatagccagagaagaaaacaagcatatgaggatgcgcttcaaacgattgctgtaacaccgatagaggactggaagtttaaaggctgttttacggtggaggatgggcgtaatgtaattagggaatgggcccatatgtcagtaaaaccaacagcgtttcttgtatcttgcaaccatattgcagcgggaatggtaacggaagcgaaaaaacaagggattcgtattccagaagatattacgattatcggttgtgatgatcaagatgtggcagatattttaggcattacgacgatttcgtattgtagtaaaaatgttggtgtgaaggcattcgaattattatatgaaaagattaatgatgagaaaatagatgtaaagcacgtagagttattgccagaattagtacatagggaaacaacataatagataaggtgtgaaaatcgcttttcaaaattgcgtttggtataattatggacaatctatgagggctaaaaggggttttgatatgagatcaaaagtagtaaaagtaattctactcattacaattgcatctttctgtttatttgcatatggctttgtttcaggtgtaaatgatgtattaaatccgaaagcttcaaatttaattaaaaagaccgatgtagtggcaaaagagaaaaagaaaacgggaacgttacaaatcgttagtttaggtgattcattaacgcgtggcgttggtgataaagaaggaattggctatgttgggcgaatgaaagaggatttacaaaaagattataagcaaaaaattgcattaacaaatttagcagttagtggtgcaaaaatgcccgatttattaaaacaaattgaaagtaatggcgctcaatattcaattaagcaagcagatgtaatcgtgttaacgattggtgggaatgatttgttcccaggctgggaatcgcttgggaaaatagatttagagacgtatcgtcctgacacagaaacgtttcaaaatgaagcaaagaaaattatagaagaaattcgtaaattaaatacagatagtccgattttttggcttggtttatacaatccttttgaagatgtagaagatttaaaagggtcttcaaacattgttgtggactggaatgcatctttagagaagttagcgctaaacgataaaaatgtatatattacaccgacatttgatttattccaaaaccgcgggaaagatttattatactctgatcattttcatccgaacgaagtaggttatacgtatatggcagaacgtttagttcaaaatgttgtaagtaaattaaaattagaacaaggaggggtaaaatgacgacgatactttccgtacgagacttgaagaaggtaattggaaagaagactcttgtagagaatatttcctttgatgtaaagcaaggagaagtgttcgggttcttaggaccaaatggtgctggaaagacgactaccattcgaatgttagtcggattgattaaggcgacagaaggtacgatttctattggtggttattcgattaaggaaaatttcagagaagcgatgcgtcaaattgggagtatcgttgaaaacccagagttgtatacatatttaacgggatgggaaaatttaaagcaatttgctcgtatgttaggtgatatatcagatgaacgtattattgaaattgctgaaatggttcatttagatgaaagaattcatgacaaggtaaaaacgtactcacttggtatgaaacaacgccttggaattgcgcaggcgctccttgggaatccgaaattgctcatattagatgagccaacgaatggtttagatccagcagggattagagaacttagggaatttatacataagcttgtaaaagaagaaaatatgagcgtgtttatttcaagtcacttgctaagtgaagtgcaaatgatatgcgatcgcgttgctattattcataaaggaaaaatgataacagttgccaaggttgaagaattaattaaaacagcaagtgatcgtgtagaatggattgttacaccaatttctaaggcgaaagatatgctagaagcggccaaagaagtaagggaagtgagtgtagaaggcgatcgattactatgccgcatggatattgcatctataagtagttggaataaacactttgtcgaaaatgaaatagatgtacatagcgttaaggagcttgtatttacgctagaagatttatttattgaactcacaaggggtgagcagcatgcgtgaatttgcgaatctagttttaaatgaatcagaaaagatttaccgcaagaaacgtatttttgttgtcatgcttattttagcaatcttgatcccgctttttgtgtatgcgcagtatcgtgaaatagaaacgacacaaaaaagactcggtacaactgattggaaggtttcattgcaacagcaaattgttgattctcagaaccggttgaacaattctaggttgccagaagaatggcgtgattggttaaaggtaagagttgagcaacaacaatattatttagatcatgatattaatccgatggcaccgggtgcaccgacttttgtcagagcatttattgaacaaggaattacattatttattccgcttcttgtaatgattgtagccattgatatcgtttcaggagaacgaagtgatgggacgatgaagatgttacttacgcgaccaattcggcgttggaaaatactccttagtaaatacgtgacgatgttatttttcatttcgctcatactgtttcttgtaggtttgtttgcttacatattatcagggcttgtatttggatactcgggatggaatttacctgttttaacaggatttgttattgataaggaaacgctaaatacgaactttgtgcatcttattccgcagtggcaatacatcttaatggcgtatggactagcatggtttgttgctatcgttgtcggaactatatcatttatggtctctgttttaattcgtaatacaccagctggtatgggcgttatgctagctgcattaattgcaggcggtattttaagctcgttcgcaacatcttgggaaggcgccaaatatatttttagtgtgaatttatcattaacggattatttatcaggaaaattacctgcattacaaggtttatcgatgggattttctttgatgaatttaactgtttgggcagttgtttctcttgttatttcgttcgtagtatttacaagacaggatatggtgaattaattagacaggaagtgacagtatggaaaatgttttaaagaatgattgggagccactattggcaccagaattcgagaaagagtattatcttactctatccagttttttgacagaagaatacagcacgcatgttgtttatccgaaggtagaagatatttttaacgctcttcagtatacaagttatgaaaatacaaaggttgttattttaggacaagatccatatcatggaccgaatcaagcgcatggtttaagcttttctgtgcaacctggtgttaaaacaccaccgtcattgttaaatatgtataaagaacttcgagatgaatatggttatgaaatcccgaataacggttatttagtaaaatgggcggaacaaggagtattattactaaataccgtattaacagttcgtcaaggcgaagcaaattctcataagggaaaaggatgggagcactttacagatcgtgtaattgaactgttgaatgaacgtgaaaagccagttattttcatattgtgggggcgccatgcgcaggcgaagaagaagttaattacgaatccgaatcatcatattatcgaatctgtacatccaagcccattatcggcaagacgtggtttctttggtagtaagccatattctaaagtaaatacgattttagctaatatgggcgaaagagaaattgattgggaaattccaaatttataaatagaaaaggtagttaacagtcgttaactacctttttattattattgttgctcgttctttaattttgcatctagtacaaaagtgccaaatgggataactgatgaaacaaatgctccaagtgcccataaaattgatttacggtgtacgattgttacttgaattactgcaaagatgaatagaataaatagaacaccatgagccatgcctgtaattttaacagctgttgcaaatcctgcgaaatatttcaatggcattgctacaaataatagtaataggaaagaaataccctcaactagtccaattgctcttaatcgtccgattggtgtagataacataaagtagcctcctttaacgtatgcttgtatatagtaaatttgtattctttttcaaaataaaatagtctattttgtttcattatatacaaaaagaaagtttacactacgagaatagtgcaaagttcaaaatatagtcacaaaagcatgagaatttaaataaaaacctatttgaagtatttgacttcaaataggttttgtgaatgaaaatattaaacaagtacatccgtttttaaaacgaatttctctacaacttttgcaacaccatcgttcatatttgtatctgttacgtagtttgcaatttctttaatatcatcaggtgcattgcccattgcaacgccaagaccagcaaattcaatcatcgcttggtcgttatagctatcgcccattgcgataacttcttcacgcttaatgccaagcttttggatcagtttgtttaagctcgttccttttgtaacaccagcttcagtaaattctaagaagaatggtttcgaacgcatcacgcttaattggccttctagctgtttttgtagtttcttttcaacttcaacaaggcgttcagcttctttattcattaatacttttactacgggctctttaactgcagctttaaagtcatctactacaacaattggcataccagtaatatcgccctcaatttcagtataaggattattttcttccgttacgatatcatcgcccatataagtatgaatccatacatcttcagtttgactaatttcaaataggttgtgaacgatttcaggagatagtgtactactaaagatttcttcgtttgttttacagttaataatttttgcaccattaaaagataaaatgaaactgccgtattcttctaaacgaagttctttcgctacattgcgcataccgaacgttggacgtccagaagcaagtacaacctttacgccttgctcttgtgcagtcattaacgcttctttcgtacgaggtgaaatagtatggtcatcacgtaataaagtatcatctaaatctaaaacaatcattttataagtcatatagaaaattcctttctttaattgaaatcaaaatacatgttcatgaagagattgaggaataatagtaagacatcaaacctctttgaaaagaagtagataaattattatgagtgtgttgctcataatattggttaataatcattggggatgaataaaaccccaatgattaaagtttgattttatcgtaacaactctaaaggtagagtgcaataatggaagttttccaatttaagatatttgttttgctgtggaacgagaaaatagtatttctagcaagattgccattacagatccaagaacgagaccattacttaaaaacgatgctagaaatggtggaagtgtggaatatgctcctgctggaacaaacataactccgactcctgtaaagattgaaagaccggctactttaaataatcgttctttatcctggacagtttcgtattctcgaaaggcgaggccaatcatgcttgcgaatacaggataaatagcggcataaccaactgcaacagggattgctgcaaagaatgaagtaatctttggaaatatactaacgacaataataaagcttgatcctaatataaacgggagacgtttataaatattagtcgttgcaataaaacctgctgatccagaaatagcgacaggcccaatagctgaaaataggccgcctagcaattggttgattcctgttataatgccagcttgtttaaaacgatctgatgcagcgttttcttcatatttagagacaaccttttgtacaacgcgaatacttgctaacatatttgttagaagtaagagcgtaacgaaaatgaccgtaattaccatgttccattcaacacgaggcattccgaaaacaaataaggatggaaaacggattatgtctgtcactggtgttattggattagataatccgaagcatgcgaataatatccagccgcatacgatactgaaaagaacggaatattgtccaataataggtagcttcatgatgaaaaaggatagtaaaataacaatgagtgaaagaataaatacgttaggttgtacttctgtatgttttccatcaaggccaaacattccctttaagaaggagccactaagctgcgcgacaagaagaaataaatacgttccaatgactgtcggtgtaaaatagcgaacgagtttatcaataagtccaaaaacgctaagaataatacaaataataccacttaataagaaagcatattgaagaactttaagtgtctcattatttgatccaaatagtacgacacctaaacttgcgtaaagggagaaaattccccaccaaaggccagcaggaccttcttgaataggaagtttatgcccaaatatagcttgcaagagaccagcaaaacctagaacaaataatgttctttgtacaaatgcgatggcttcagcgccattaagaccataactagttgcgacactaattggtacaataaggcttccagctaaaataaatagtgcccattgtaaggcggaaagaaatgtcttcattatatcaacctctttcatagattccgtatctagtatatacgtattttatttccactggcaaagattgtaggtagagaaaagagttgaaacacagtatgaatgcacgtaagcaattatggatagcagttatatgtatgacttttgttgtaattctaggaacgataggatttatgacgattgaagagattagtttgtttcaagcattttggatgacaatgattactgtattgactgttggatacggagatgccgttcctgtaacgcaagcggggaaagtatttgcgcttcttattattcctgttggcgtaggtattgttacgtatgcaattggggtagtggcagctatgattattgaagggaatttatttcatgcagtacggaggaagaagatggataaacaaatagcgcagttgaaaaatcatattatagtatgtggttgcggtagagtggggcttcaagttgtacatgaattgcaagaaaagaatattccatttgtcgttgttgataaagatgaaagtatattggagcaggaaaagcttttatttgtacatggagatgcaacggaagatcaagtattacataatgccggaattttaaaagcagctggtttagttgctattgttgcaaatgatgccgaaaatgtatttattacattaacagcaagagggttaaacgatacgattaaaattgtggcgagatctgaaaagccagaaactgaagagaaattaaggcgtgctggtgcaaataaggttattaacccatctagtatggcgggtattcatatcgcaaaaggtattgcaaatccattaaccgttcattatattgatacagtgttgtatggagtagaacagtcatttgtcattgaagaaattctagttggaaaagattcaatattagttggtaaatcgttactagagagtaatgtaaggaatcagtttgatgtaacaatattagcgatttcaagaaatggtaatattatacataatccggcaggacaggaaaaattgaaagaacgtgatatgataatagtatttggttcagtagaaaaattggtacaattcgagaaagaattacaaagtacgaggtgataaggaatgcaaatatctagcgacaagattttaaataaaatggcgaatgaaattgcgaaggcaaaaagtagtgaaggacaaaagtcaaaagaacatttattagttgtgcgtgctttatgtgacttattattagatgaacaagttgaaacatctacatatagagaaccgaaaattcaatcgcaagtaattggatcacaaccagtaacaactatgcaaccaattgcacctgtttctggggagccagtatatataaaagaaagtgatgcaaacggtaattctttatttgatttttagaagataaatcgtttggcttatatgcaaaaattgcttatgataaaggtaaaaaaggggaattaagatgaaaattttctttttactaggttgtattgcagcggggctatctgttgcgttaggggcctttggagcacacggtttagaaaataaaatttctgcaaaaatgttagaagtttggaaaacaggcgttacatatcaaatgtttcatgcaggtggactattcgtagttgctttattgatggataaggttcaatcatcacttttaactactgctggttggctaatggtagctggaattattatgttctcaggtagtttgtatgcattaagtacgacaggcattaagttctttggtccaattacacctcttggtggtgtagcgtttattgtggcgtggattctagtagggactgcagttgtaaaaggattataaaaaacaaaagctggcatttgccagcttttttatggtcttggagcataagttgcttgttgacccggtaaatacgtaattctttctggaaattctacataatctaagtaaatcattagtaataagtaacgctttccggattcaggctcactaatgataatatgatcacgaccagctgcctcgataatacctgtataagattgagtaccaagagaactaccacgctcataagtcattacaactgtagcttgcttacctttgtttagacgaaggatattttcaatatatgattgttctagaggtaacatcccttgagaaattgcatattgcgcttgcgcagcttgttgctgcattgcttgttgttgctgttgctgttgcccagcggtcatttgttgcggttgtacataagttccagatggttgataaaaacctgttccataataggggttttgttgctgtgtcattcaaaaatccctcctcatttttattccttaatatacgctagggcagtctccagcagatggctggaagaagcagtgctttttaaagcgaccagagttttgttggttataccaagttggtggacatgccccttcaggtctaaagaaccataaggcaaagttggcaggccaaaaacgttgcccttgaatggtccgtctcgctagggcaatatcttgttcacgtgcccgttgataaaagtatcctttttgcgttgcttcaaaaccgccggggttttgataaaccatttgacgtaaattacgaatgcttttaaaatctaaacaatttccgcggacacgatttaccccaacgtttccgaccattaacattccttgttgcccttctccttcggcttcagcacgcatcagtctagccaacaactttacatcttcttcgttataagcaataacacccattatgtgtcacctctctttttggaataccttttggaaagaggtttatctctagatgaagtgtgtaacaattactagttcatacgtatgaggaaaagggctcagatatgacaaccaaacgaagttttacattgagagtggaaaataaaaaaagctagcgtgagccagcttttttattaaaaaactttagaccataagtttgagaagaaatcaccaatagagcgcattgttaacacaaaccaatttgctttttcaacttcctctgtcgtttttgcagtaactttcatacttttactaccgtctaagaaaccatatttatcagttgattctaaagtaattgagcctactttggcatctttcttaataggagcaactaaatgtccatcttcagcaagagatttatctaattcagtcccaattttataaggttctttgctaccttttttcgcaattactgttatttctttttcgggtgcaacagttacttggtcttctttcccttttactacagagattgtattgttcttattaacttttagtttttgtttttcaaagttattaaatccatattcgattaattcacgagattctgtgaaacgttcatccattgattttgttttaataataaccgagataagacgtacatcaccacgtttagcagtaatagtaaatccgtatccagctgtatcagaacttccggtttttaaaccatcggtaccttcataagcgaaagaagctcctggtaacatccaattccagttttccatacgaattggttttgggtgattgtctgggaagtttctaaatctttgttttgtatcctctagcatttctggatactttgtaatcattgcttttgaaagcatacccatatcacgagctgacatagagttttctgcatttggatcagtaccctcaggatgttttccttttaagtcagcgttatttaagccagtagcgtttacaaatttatatttctttaatcctagctttttagcatgttcatttgcaagatttaagaagtttttctcacttcctgcaagaagttctgctaaagcgatactagatccatttgctgagaatataacaatagaatgatataattcttttacagtatattgacgtcctttttcgaacggtacattagagaattcattattacgagagacttcataagcgtaatcagaaatatttactttcgtatcccatgtgatttttccttctttaattgcttctaaaacagcgtaaacaacaattaatttcgacatactagcaatagccagcaattcatctggattttgctcgtgaagtatttttccagtatctgcatcaaataaaagtgcagcggctgcctcaatatgtattttttcttccgcatgggatgttgttactcctaaggaagaaattgacaatacaagcaatagtaaaatagacaaaatttttttcatatagattatcaccttcgcatcgttatttagcatatagctcgtatcattttagcatatctttatatataaaaaggttacaattttacaataaatttgaaaaaatgtcggtttttcttcaaaagtgcagaaaaaaggagatttttgaggataaatatagagaagaataaaaaaaggaacgaatttcgttccttttcaccatttatatgtgtaaaaatttctctactttttcgtctggtaaaatgtttccaacgaagaatgttccaaattcaccataacgagcacttacttcatcgaagcgcatttcatatataagttttttaaattgaagaacatcgtcagcgaataatgttacgccccattcgaaatcgtcgaatccaacagatcctgaaatcacttggcgtactttacctgcgtattgacggccaattttactatgactgtacatcatttttttacgctcttccataggaagcatgtaccagttgtcatcaccttggcgacgcttatccattggatagaagcaaatatgatttgctttcggcaattcaggatataagcgagctaaaatttgcgggttttggtatggatcctcatcagctggaagatagttgcttaattcaacaacagatacgtaagaatatgcaggaaccatatattcagctaaagttgttttattcaattctgtctcaatttcatttaactcttccattgttggacgtaaaatcataagcataatatcagctttttggccaacaactgtatacattgcgtgactaccttttttcgcagtagctacttcgttccatttttcaacgacatttaaaaattcagacactgcttgtccgcgttcgtcgctagataatgttttccatgcagcccaatcaatagaacgtaaatcatgtaaacaataccagccatctaacgttgttgttgcttcactcattctattcacctcagttaatgatagttttacacgttaactatagcatatatagttttaaaatcatctatataaaaccttggcgcataaaattgtcacatttaagtgtttaagcaaggtgaatttaacggctgaattttatgaaaatataatcatttttattttatctattttttgggagctataagtttaaaatatagaagaaaagcagtattcttaaagatagagtttttttaacatatgtaggagggtttattcgtgagcaacttatttacaacagtaaaagaaaaagttcaaggaaaaggcatttctatcgtacttcctgaaggaactgatgaaagaattttaggcgctgcagagcgtttagcaaaagaagagttagtaaaaccaatcttagttggtaatagagaagaaattagcgcaaaagctgctagcatgaatttaacattagcaggcgttgatatttacgacccagctacatacgaagaaatggatgcgatggtagcatctttcgttgaacgccgtaaaggtaaagcaactgaagaagacgctcgcaaaatccttaaagacgaaaactacttcggtacaatgcttgtatacatgggcaaagcacacggtctagtaagtggtgcagctcactctacagctgatacagttcgtccagcacttcaaattattaaaacaaaaccaggtgttacaaaaacttctggcgtattcatcatggtacgtgaagaagagaaatatgtattcgctgattgcgcaattaacattgcaccaaacagccaagatttagctgaaatcggtatcgaaagtgcgaaaactgctgagttattcggcattgatccacgcgttgctatgttaagcttctctacaaaaggttctgcgaaatctccagaaacagaaaaagttgtagaagcaactcgcattgcaaaagaaatggctcctgagttaactttagatggagaattccaattcgatgctgcattcgtaccatctgtagctgagaaaaaagctccaggttctacaattaaaggtgatgctaacgtattcgtattcccaagcttagaagctggtaatatcggctacaaaatcgctcaacgtttaggtaacttcgaagcagtaggaccaatcttgcaaggcttaaacatgcctgtaaatgacctatctcgtggatgtaacgaagaagaagtgtacaagttagcattaattacagcagctcaagcactttaattctataatgaattgaaataaagaccgtcgctattatagcgacggtctttatttttctaaaccaagtgctttattattacgatcaataatacgttgtaaattcatctcatataaaggaatctcatctattgttaattgagatggtgttaactttggagcgaattgctgcaatgtttttaaaagacgcatcattaaatcttgtactgtaatggtttcaccaagtaattctgagagtgaggccatcgtacttggtacaatttcagggtacgtaaagcgtgtttcttccccttgaattgctaggttgtagaaatcacgaacgagtgcggcacgctcagagccacttccggtagcgcagagatagatttggacagcgacacctccgcgaatacgacgttgtgaaataccagcaaatttttgatcgcgaatacttaagtcataactaccaggacagtaagagccgacaatttcttttgcctcgatagtaacgtcgtaatcctttaacatctccttaatcaaatgccacattgtatcgtatccaaggtcaatatcgatacctttttctgtttcttggaataaaagtgatacgtttaaaacaccttcatcaagcacgaccgcaagcccgccagaattacggacaataacattgaagttgttttgttttaaaaaagaaataccttcttctaaatgcggaaggcgtgaatcttgaatgccaaggacaattgtattgtgatgaacccaagaacgcattgttgcggctgacttgccatttccaatgcttgtgcataatgtgtcatccattgcgaatgactgaagtgcatggaatgttggtcccaaactggattgatctacaatgcgccactctggctgagataaaatggaacgggaattgctcatataactaaccccttatctttaaaatgacaatctctattatagcaaaaaatgaaggatggagttttctcacatataaagggggagcttagaggtgaaataataaaaaggatgcattacatgcatcctttttattctgcaattttttctaaattaccgtttcggtccattcggaaagatgtttgagaacgttcttcgtcatccatgactgccaatttacgagctcggttcataatgttcataagtgtttcgtaatcttcttgtacagtatgagattgcttttctaatttttctagtttcttttctagttcctcattccgaaggatttgtgctttaatttcttgtttcaatctcgtattctcgttttcaagagctgtcacttttatatttgaagatccgactgtttgtaaaaaataaataacatcttgcattgtcatagagcttcttgcagcaggagcagtagattcttgatatggaatagcttctttatattgtacgattgattcttcttgtactaattcttcataatcagttatcgaatctgaagctggtggtgtataaagtaaacgttttttcgcttgttcaccgcttgcagcacgcattttatctttacgatgtttttttgctagttgaagagcttgttcatagctatagcgaacaacagcattccagcggaaaccacaagcagcagatgtacgatttaactgatcccctacttcctcaaatgcatttaattgcgtacttccttctctaacatgacgaagtaccgtttcagcaagtaataaatcatcctcatctgtccaagcatcttgtcttactttcatagattcaactccctttctttttatgaacttcctatttttataatgggcaaaaaaataaacttttatacaaagcttttaaaaatatggtagatttcgatgaaaggtaaaaattttcccatgaatggtgagcgcttctgtaggagagcatataaatatgtagcattatgtagagaataggctttgtagggaaacttgcaacgagcttcaaagagcggtaaaataccatttagtgtttatttttaaacgtacttgagaaaagtttaaaatagaggaagtgttatataatgggaaacgagtttcgcgtgtgcgatgactgtcaggcaacgaacgttaaaacgttagttccgaagttaaaaaaagtagattcatgtgcaacgattgaagttggatgtcagtcttactgtggtcctggtcgtaaaaaatcattcgcatttgtaaataaccgtccagttgcggctccaacagaagatgagttaatcgcaaaaattgaagcaaagttaaataagtaagaaaaagaagagtgaaaagattactcttcttttttatgcccataagaggaataatttattctgcgaaagtactcttgtatggacgaacgttttctaaaggatagacacaacttttgtattaaaattccaatttgtataaatttatatttcaaaataatggttgacagtcttttaaagcgataggtagaatagaagtgtctgattctgagaatcattatcaggaaaataacaattcacctaatttttttattactatttgagaataaatttcatttcaataaatatatgttgttagttaggatggttgagggatggaagcgagcgcaagcagtatagaacagcaagaagagaatgttaaagagattaagagcagaccgcttatcgcttctattattttagtagcgggtacagttttgttagctttaagcatggcagtttctatttcttttggggctgcagatattagtttaaagactgtatggcaagctgtatttcggtttgatggatctattacacatcataatgtaattcaagagcttcgcatgcctagagcaatagggggcgtagttgcaggtgcctttttagcggtatcaggagcaattatgcaaggtatgacgcgaaatccacttgcttcgccatcgttaatggggattacagatggggctgtatttggaattgcaattatgtatgcattttttcctaattcaccttatttaatgtttgttatcgcatcttttattggagctgcgtttggtgcaagcattgtatatggaattgggtcttcttcaccaggtggattaacacctgtgaaattagctttagcaggtgcagctattagtgctttattaggggcgatttcatctggaatcgcattgtatttcaatcttgcccaagaggtaagcatgtggaatgcaggcggagttgctggagtgaaatggcaaagtattaatatgttagtgccaattggccttgtttgtctttttatcgcaattatgatgtcgagatatattacaattttgagcttcggtgaagaaattgcaattggacttggtcaaaatacgacattaattaaatttatcggaacagtacttgttcttgttttaacgggttccgcagtttccatggcaggatcagttggatttgttggtcttgtaattccgcatatgactcgttttcttgtaggctcggactatagatgggttattccatgttctgcggtcttaggcgggctgttaattgaatgtgcagatatgttatctcgcgttattaacccgccatttgaaacgccaattggagcaattacagcgctaattggggttccattcttcctctacttagcacgtaatgaagggagaggaaagatgtgaggacgagtgtcttaacaaaaaagaacatttctatattaacgattttagtaggactaatcgtttctatatttcttattagtttaaatacaggaacttttaaaatcccgccaatggacgtattaaagtcattggttggactaggggctgaagatcagtctgttattttatttgaattccgcatgccgcgtatggtaattgctatactagtcggatctgctttagctatgtcaggtgcgattttgcaaggtttatcacgaaatccgcttgctgatccaggtattataggtattaatgctggagcgggattaacagttgttatattcgtctacttcttcttcgggaaagtagggactggtacatttttatctgtattcattcttccattcttcgcactagttggagcgatattagcagcggtaattatttatttactagcatggaaagacggcgtttcatcgactcgattaatacttgttggtattgccgttgcagctggatttggagctgttagtttaattttctctatgaagatgacatctaacgattttcgttttgctacgatttggctggcgggaagtctatggggtacagattggaaattcgtattaagtgtacttccatggatggttattttcttaccgcttgctataagtaaagcacacatattaaatgtaatgaacctaggcgattctacagcagttggccttggtgtaaacgtagaaaaagaaagacgtaaattattatttattgcagtttgtttagcaggtgcatctgttgctgttgccggtggaattggctttatcggtttaatggccccgcatttagcaaggcgccttgttggtggtaaacatcaaattatgttgcccaccgctgcgctaataggaacgtttttacttttattcgcagacgtaatttcaagaagtgtattaacaacttcagaaataccagtcggtcttgttatttctgtaattggtgcaccatatttcatttatttacttatgaggacaaaataaagggaggcttttcgtatggcaactttagcggtggatgcggtatctgttggctataatgaaggtttaattattgatggtttaacagttgaaattccggaagggaaaattacaacaattattggaccaaatggttgtgggaagtccacattattaaaaacggcgtctcgtattttgaaggcaaagcaaggtactgtttatcttgacggaaaagcaattgagaaacagccaacgaaagaaattgcaaagaaaatggcgattttaccacaaactgcagaagtgccaacgggtcttactgtatttgagcttgtgtcatatggaagattccctcatcaaaaagggtttggcacgttgaaagaagaggattatcgctacattaactgggcacttgaagtgacaggaatgaaagaatttgcgaatcgtccagcagaagcgctatcaggtggccaacgtcaacgtgtttggattgcaatggctcttgcacaaggaacagaattacttgtattggatgaaccaacaacgtacttagatatggctcatcaattagaagtattaaacttattgaaaaagttaaatgaagaagaaggtagaacgattgttatggttatccatgacttaaaccacgcttctcgtttctctgatcatatgattgcattaaaagcaggtaagttaatgaaacaaggaacgccagatgaagttatgacaagtgaaacacttcgtaacgtatttgagattgaagctcaaatcgttccatgtccagtaaactgtaagccaatttgtttaacatatgatttagcgatgattagtaatcaattgcgtaaaaaagcataagtagaaccccctcgtaaagaggggggcttctaatggacgttgagcttcttatatatgaatgggaagttgaacgcccgttagaatgggttattaacaacaattaataaatatatattaattaattgttatattcgtttcttatagttcattgtaacttataagataaatacagctagaaggagtgggaacatgaagaattttaaaatggcactattagcaatggtactagttgtgacttctgtactatttgcagcttgttctaataaagaagaagaaaagaaagcagatgcaaagactgaagagcgcactgtaaaacatgcaaaaggggaaattaaaattcctgcaaacccaaagaaaattgctgaccttagtggttcaacagaagaattattaattttcggtatgaaaccggttattactgctaatacatctcaagaaaaaattgatgcacatattgaaaagaaactaaaagacgttaaaccagttggttctgcttggggcgataaaattaacattgaagcagtagctgttgcaaaaccagatttaattcttgtaaataatcgtcaagaaaagatttatgatcaattatctaaaattgcaccaacagttatgttaaacactccattagatcaatggcgtccaaaattcgaagaagtaggtcaaatcttcggtaaagaaaaagaaacaaaagaatggttcaaaaagtatgatgaaaaagcaagcaaattacatgacaaaatcgtcgctaaaactggtgaagcaacatttatgaaaatggctgcatatccaaatgctttccgcgtatatggtgattacggttacggtagcgtaatctttaatgatttaaaactaccagcagttaaaggtacaccaactgataaaccgttagtacaagtacaaaaagaagctttaatcgattacaacccagattacttattcgtatttacaactggtgacggttctcagcgcttaaaagaattccaagaagaatcaatttggaaaaacatgaacgctgttaaaaataaccacgtatttacaattaaaaatgaagacttaaacaaaggttacttcccactagggaaagatatgatcttagacgaagttgctgaattcgttttaggtaaataatgtataaaggaaatcacttttacttcggtaaaggtgattttttctttttataaagggaattaatacagtctttcatttctttctgtttctcatttcgtttataatataaagtaagaatgtagtaaagaaagggggatgtcggaaagtggtatatttaaacgacaaactcagcgaaacaaaagtgtttaaagacccagtacataaatatgtgcacgtgcgtgatcgtgttatttgggatttaatcggaacgaaagaatttcaacgcttgcgccgtattaagcagcttggaacgacattttttacatttcacggtgcagagcatagtcgctttactcattcgttaggtgtatacgaaattattcgtcgtatgattgatgatgtgtttgatggcagaccaaattggaatgctgaagatagattgttatgtttatgtgcggcattacttcatgatgtcggtcacggcccattttctcactcgtttgaaaaagtattttcattagatcatgagaaatttacgcaaaagattatcgtaggcgatacggagattaatgatgtattaagtcgtgttgataaggagtttccgcaaaaggtagcagatgtaattgcaaaaacatctactaataaattagcgattagtatgatttcgagccaaattgatgcggatcgtatggattatttattaagagatgcttattttacaggcgtaaagtacggaaacttcgatatggaacgtatactgcgtgtaatgcgtccgtatgggaatcaagtagtcattaaaaatagtggtatgcatgctgttgagcattacattatgagtcgttatcaaatgtattggcaagtatatttccacccggtaacgcgaagtgcagaagttattttaacgaagattttacaccgtgcgaaatcactgcacgagaagtattatacatttaaaaatcatcctgttcatttctattctttatttgaagaagaagtaacagtagaggattatttaaagttagacgagaacgttatgtattactacttccaagtatggcaggaagaagaagattcaattttaagcgatttatgccgccgttttatgaatcgaaatctatttaaatatgtagagtttacagataaacacggtttagataattggatggaattaagtagtttatttaaaaagattggacttgatccggagtattatttagtagttgattcaacatcagacttaccgtatgacttttatcgtgcaggagaagaagaagagcgtctaccaatcctacttcttatgccaaacggagagcttagagagctttcacgtgagtcggacattgttgaggcgattacaggtaagaaaagaacggatcaaaagctattctatccacatgatttaatctatgaagatggaagaaaaggaaaatataaagagagaattattgagttgttagaaggaaagaaataagaagcagctaatggctgcttcttatgaaaaaacttgaaattatttgtcacttaagcgttttccgccaactgcataatggtttttagacatttcttcgatgaaaacaacgatgttttcttcaggagcaccagttgtttcgcttactgctgctgttactttctcagcaagagctttcttttgttcttctgtgcgtccttctagcattttcactgttacgtatggcatgtacaatcgctccttttatgtaagttacactcttattatagcggattatggggaagaacaatcgaaaaaacaaataatttctttttttgacatatggaagaggagatgaagcatggatcagttatttagatacccgttgcaccaaattcctttggtagcaatggccattattatcgcattatcagttcatgaatttgcacatgcatatgtagcatataaatttggagacgatacagcaaagagacaaggccgtttaacgttatcaccgatggcacacttagatcctataggtttgattgcagtattaattcttggattcggttgggcaagaccggttcctgttaacccatataactttaaaagaccgcgtcttgcaggtatattagtttcaattgcagggccgattagtaacttaattttaagcgcaattggtttaattatttggtatagcttagtaaaatttggtgtattatactcaattccatctgcagtagcagatacgttagctcaatttttccagatttttattatgctgaatatcgttttacttgtatttaacttattaccgatcccgccacttgatgggtatcgagttgtggaagatttagcgccagcaaatattcgcgcgaaaatgacacagtatgaaaaatacggggcaattgcgttattaattctcgttattacaccgcttagtaattacacaattcaacctattttccaggtagttattccgcatgtatttgtatttttagatagcattattgcgcctatttttggccttttataatttttaagtgaggaggattttacatatgacagagaaaaagaaaaaaatcggttttaatatcgtgaaaaatgattcaacagatggacatggtggatttggtgttggggcattaagcttagaaaacatttcacctgtatttgttgatgtactagagaaaactgcattcgttgatattggtgcgatgcacgcgcgtagtacagtagaaaaaggtattaagtttttaacaaataaagatgaagttccaaacggaaaaccattttggcttgtttgggtaacaattgaaagaactgcgacaggtgcgtattatgcaggtgtaacagcttgtgaaatgacagttgaccgtgagattcgccgcggatataaatcacttccagagcacgtaaataaaatggataaatcattgaagcgtcacattatggttgaccatatggatgaatcatctaaaaaggtacttggtacgttcttgaaagaacataatgaagcgatttggaacgaatctagtgaagaattacgccgtgcattattaagtgaataaaaatagctgacggatgcccgtcagctatttttttaccaaggaagatattttttccaccaacttgtttttttcttttcttcagtcgttttttcaaattcttctttatcatcgacgtgatccatacaatattcagtcggttcggtacctttagcgaaatacattttcacagaaataggacaattttttgtagcaattttaccgttctctggattgatattaaccgctacgacgtcacttggttgtttaaattctttttttggttgtccctctaaccctttctccatcgtatcagtccatattttcttcgcatatccttgttctgctacgtttgaaatagatttaggttgatcatatccgacccacacaccagttacgatttgcggagtaaatccgatcatccaactatccgtttcagtagaaccagatttgccggcatatgttcttgatagtttggataacatcgattgaccagttacagcagcatagctgcttagtttcttattaaacataccagtcatcatttcttccattacaaacgctttgctcttgtcgagaacttgtttactctctaaatgagcatcgtataatatatttccttcatgatccataatgcggcgaatgaaagtaggttttacttcttttccaccatttgcgaacatgctataagcgttaaccatttcaattggttttactggtgatgtaccaagagctagagaaggcacatcttttaatgcacttttaattccaaattgtttcgctgtttttgcaagcgcgtcatcgcctaaaaacaaattcgttttcacagcataaatgttatcagagactgcgagagcttgtgccattgttacgaaatcatctgcataataatctttatagttcttcggtttatactttgaaacgccgtcacctaaagtgaatacagtatattcgctttttaagcgcgtagcaggcgtgaatcctcgttctaatgccgcataatatagaaatggcttaaatgtagaaccaggctgacgaatggcttgtgtagccctgttaaattgactcgtagtataatcagttccaccaacaagagcagccacttcacctgtctttggattcatagagacgagagcagtttgtatgtttgttgtgtcaggtatgtgatcttttacagcttgttctgctacagcttgtagtttagggtctagcgttgtataaattcgcaagccaccccgttgtaaagcttgttcgtctaatccaacatcacgaaggagcgaagcttgtacagcatcttggaaatatggtgcgacctctgctacttttttcgtatctaatgaggcaaaagttagtggctctttcttcgctaaggctgcttgttgcttcgtaatatatccttgttctaccatttcatctaatatgagagcttgtcgtcctttcgcacgatcctctttcaaaaagggagaatagacacttggccctttcgggatacctgcgagcatactagcttctgctaatgttaactcttttgccgttttatcgaaatatagacgggatgcagcttcgatgccataagcgccatgtccgtaataaattgtatttaaatatccttctaaaatatgatttttattataattcacctcaaggcgaattgtgtacattgcttctaatagtttacgtttccacgttttatcatgatctaagtaaaggttacgagcatactgttgtgtaatcgtactagcaccttggacttttgccatcgcttttaaatcggcaacaatggcaccagcaatacgtttcatatcaaagccatgatgtttgtagaatcgttgatcttcaatagatagtgtcgcctcttttacataaggtgaaatttcattaagagatacattgtaacgtttttgcatttcattactttgtcctataacagtgtcatcatttgcgtaaaagacgcttgtttgcgggaccgcaacaggaggaggtcccataatttttgcaactataataataacaaaaaaagaaaaaacgaagaaaaggacgcaagaaaacattgcggtgaagaaaagacgtttatattttttaagttttggattcatagtttgatccatcttttttcagcccctcattaatacaagcgttattgtattagtattgagggttttcatttattttaaacaatgaaatttcgaaaataaaaaagccccttccattaagaaaggagctcaaaggcacgtgctggccaatcagtaatgatgacatctacaccataatcaatcatagtttgtaaatctttgtattcattaattgtatatggacggaaaacatacccttgctcttgtgctaactgcacaaattctttcgttaataactggaagtttggatgtaatccatttgcttctctatgttttgcttcggcaattggatcagaaagtggtgtatcatataaaattgctcttgggatttcaggagcaatttctgctaataatgaaacagagtcatggttaaatgatgaaaatacaatttgattagaaagatgatattcacgcacaagtgcaacagctttttcctcaatctttgggtaatgaataacatctgtctttaattcaatatttagttgtaagttcgttgtggaaagccaaatgaaaacctcacgcaacgttgggatttttgcttcatggaaagaagggtctttatagctaccagcgtccaatgattgtagttcctctaccgttttttccgaaacaagtccaacgccatttgttgtacgatcgacggtttcatcgtgaattacgacaagttcaccatcttttgataagtggacatcgagttcaattccgtgagcgccaatgcgttctgcttcttggaaggcaatcatcgtattttcgggatgtgttccttttactccgcggtgagcgaaaataagtggtttactcatgtgaaattctccttattatctcttttctttcattatgaaactgctttagggaaaatacaattgaatatgacaaacatttacaaaagtctaacagttgcacaaaagttaacgttaacgtaaaatgtaataatcaagtgaagggaggaataaacatgtataaaattgatgaagtaacaaagcaagttggtttgacaaaacgtacacttcgttattatgaggaaattggtttaattcatccccctgaacgtagtgaggggaacattcgcctgtatacagacggggatatcgccagaattaaaaaaattgtggaagcgaaagaagtgttaggaattacgcttcaagagatgcagcattttttatcgttaaaagaaagaatggagcaaagaagaaatagcgaaaaccctcgtgatcgtgaagtgattcaagaaattaaagatatgcttgaaaaacaagtggaaacgctagacgaaaaaatggagcaaatgcaacgtgtaaaggcagaactagaagatagtttacatcgtgcagtaacatttttagagaacacaaaaggagagtaatcaaaatggagagcaaacaaaaactagggagattgattacagtggtggctaccttccttgccttttcgggtataggggtagttgacccaattttgccaattattgctgagaaaatcggtgcaacgcattggcaagttgaaatgttatttaccgcttatattttaacgatggcaatcatgatgttaccagctggaatattcgcatcgagatttggtgataaacgaatgatgacgattggtcttgcgatcgtgactgtatttgcgtttatatgcggtatatcgcaaacgattgctcaattatctcttttccgcgcaggatggggattaggaaatgcgatgttcttcgcaacggcgatgacattattgattgcattaagtaaagaagttcatgaagcagtaggattgtatgaagcagctatcggtttagggatggcaggcggaccgttattaggcgggatattaggtggacattcttggcgttacccattttttgcgacgagtattttaatcttcttagcatttattttagtattcttttttgtaaaagaaccggagcgaaaagtgaagcgtaaggctgctggggtaggagaattacttaacctggtgaagtataaaccgtttatgcaaggtgcgatttcaggaatgttatactactacggatttttcgttgtgttagcatattcaccacttattatgcatttatcagctattcaattaggctttgtattttgcggatgggggcttgcgttagcttacggttctgcaattttagcacataagctagaagggaaatatgaaccaaaaacattattaaagggtagtttactcgtatttgcgattttcttaattgcactattctttgtgaaaattatgtggttacaaattactcttatcgttttatcaggattggcatctggcttaaacaatgcattatatacaagttatgtaatggatatttcaccttatgaaagatctgttacgtcaggtgtttataactttgttcgttggttaggtggtgcgattgctccaattttatcaggaattatcggtcatactgtttcaccacaaagtccgtttttagtaggtggaattgttgtgttagttggttgtattatgatcctaattccaattcgtaaaccagtagaaatagagacaaaagccctttcttaagaaagggttttctttccttttgcggtgcaaaccctttccgcacatatgttagaaccctctgactaaaatatattttcggtatttttgtacttttaactatacattttggatgttttgttttatttttgttaggggacattaatgatgtccctattataaatttgcattgaaaggcgtgattgtacgatggaactatggttcactgaaaaacaaacaaaacattttgggattacggcgcgtattaaccgcacattacatacggagcaaacagaattccaaaaacttgatatggtcgaaacggaagagttcggaaacatgcttattttagatggcatggttatgacaacagaaaaagatgagttcgtttatcacgaaatggtagcacacgtacctttatttacacatccaaaccctgaaaacgtattagttgttggtggcggtgatggtggtgttattcgtgaagtgttaaaacacccaagtgtaaagaaagcaactcttgttgaaatcgatggaaaagtaattgagtactctaaacaatacttaccatcaattgcaggcgcattagataatgagcgtgtagaagtaaaagtaggagacggtttcctacatatcgcagaaagcgaaaatgaatacgatgtaattatggtagattctactgagccagtaggaccagcagtaaacctatttacaaaaggcttctacgctggaatttcaaaagcgttaaaagaagatggtattttcgttgcacaaacggacaacccttggtttacaccagaactaattacaactgtgtttaaagacgtaaaagagatcttcccaattactcgtttgtacacagcaaacattccaacttacccaagtggtctttggacgttcacaattggatctaaaaaacatgatccattagaagtaagtgaagagcgtttccacgaaatcgaaacgaaatactacacaaaagaattacacaatgcagcattcgcattaccgaaatttgttggggatttaattaagtaagagaattgtatcaaacaaataaagtgtaagtagctcatttaaggtgtttgtccagaagacttgaacatgctagctacttacacttctgtagagaaaatcgtcttcttgttgttaaaaagaagacccggtaaatcgagaaagaggagcaattcgctccaaatttgagaaatagtgaaaggttgggataccttaagttccacataaggaggaaaagaatatgcgttttgatgaagcttattcaggtaaagtatttattaaaagtcatccaagttttgaagagtcaaaggtagttatttatgggatgcctatggattggacagtaagttaccgtccgggatctcgttttggccctgcacgtattcgtgaagtatcaatcggtcttgaagaatatagcccgtatttagatcgtgaactagaagaggtaaaatattttgatgcgggtgatatcccattaccattcggaaatgcacaacgcagcttagacatgattgaagagtatgtatcaaaacttttagatgccgataagtttccactaggtctcggcggtgagcacctagtgtcttggccaatttttaaggcaatggcaaaaaaatatccggatttagcaatcatccacatggatgctcatactgatttacgtgaatcgtatgaaggggagcctttatcccactctacaccaattcgtaaagtgtgtgatttaattggtccggaaaacgtatattctttcggaattcgttctggaatgaaggaagaatttgaatgggcgaaagaagtaggtatgaacttatacaaatttgacgtattagaaccgttaaaagaagtattaccgaaacttgctggccgcccagtctatgtcacaatcgacattgatgtattagacccagctcacgctccaggaacaggaacattagaagctggcggtatcacatctaaagaattattagattccatcgtagcaattgcaaattcaaatataaatgtagttggagcagacttagtagaagtagctccagtctacgaccatagtgatcaaacaccagtcgcagcaagcaaattcgtgcgggaaatgctgctcggttgggtgaaataaaagcggaagcggctcgctcagaatgtgagggggatggagtttcagacgtagaggcgctttttgcctcgaaggaagaagcgaagccaccgatcattctagccgctgcagctagataaagtaagagccctctatatgattagagggctcttattttgtcgttatgtgtcggtaagtcgatatattaaaaaaatcgctgatataattcgagttgcgccgatatattaaaaaaatcgccgatataattcgagttgcgctgatatattaaaaaaaccgccgatataatttcatttaccgttacgcaacacaaaaaaaagctattctcaaacgatgggaatagctctttttcttatgcaaccttctcttccgaagtaactccgcgaatttcatcagcagagcggattggatatttacggaacacaatagatccgatgtatccgacaatagtggtaacgattccacataatatagcagcaattgttacttttacaacgtcattaaatccgaataggacaagaagtcctgggattggtgatgctgttcctggtgcattattaacaagttggaatagcgatgtaataataccggcaagtgcaccgccaacgaaatttgtcatatagataggaattggatttgctgagacaatatcggcttgtgttaaaggctcgattgctacagcaattgtatctttctttgaacaaatttttaatcgtttaaagaaaataaagttcatcggggctgaggcggcaacggcaagactaccaatcgccattggtaaacctgttaatccaagcattgcagttagtgccatagaacttagtggagaggtagaaataactgttattaatccaccaagcataatacccataatgataggactttctgtagttgcaactgaaatcatagaaccgattttaccgagtgttgcgttaacaagcggatccataagcattgccattccgcgtgagattggtgcagcgataaataggattgctaaaaattccacgccagctggtaatttcttttcgagaaatttcacgacgaaagcacaaacgtatccagcgaaaaatcctggtaaaataccgaatccactagtagcaataccaattaaaacagcgtatacgggggaaacaccgattgctaatgcgactaaaatcgctgctgcgacaccgctcatactaccggaagcttctcctactgattgtaaaaagtcattatgaaacatttctccacctatataacggtgaaatgcttcaataagaaaacttgcgattgctgcattagctaaagcacccatcgccttcattccataaggcgcacggtaactaaaaagtgtaaatagacaaagtacaacaagtaatagtgctaaaccttgcaagatagccatttgaaaactgtctcctttgatttttgtaataaaaattcgtatcattcaataataatataaaagtgtatgaaacggaaaaattttttcttgggaacttgctgtaagaaaaaatcccttacaataatgtaaggaaagtgtaagacttttagatagagtatagtatgctcttttccgtataatacaagtatagatataatactagtgagaaagaagtgcaaacaggaggttcatgtatgaaattggtaattaaagttttagctatattcgccattattctaggtggaacagcgtattatttgaacacaaaaacagaaggtgtacatgcttttgtagacaacttcttttcaaataaagaaatacaagattattatgcggttatagataaaggtgagaaaaaagacggagaatacttgtatacttttaaagggtatacagaagacggaaagttacagatcattaaaagaatgatgaaccgtgaattgcatacgggggcgtttataaaaatttatgcaaaaggtatgcaaggaaaaggatgggctgaaatcccgaaagaatctattccacaaaaagcgttggaaaaaatagaaaaaccataaaaggagcgactcattcgctcctttttagtgcgttaaaatagtgatagatgttttttccttgttagaaataatttttgcacgtccaccaattgggaaagtgaaaatcggggttgtatgcccgaaacttgcgtttgcaatgataggaatatgtgcaagttcaggttttgaagcaatcatttcttgaatgtcttctatcgtacattctgcacctttttgcatctttcctataatgattccctttatgtattcaaaatcttgctgctgcataagggaatgtaaataacgatcaaaagttttaagagtagatgttccagttaaactatcttcttcaataaataaaattttgtcctttaaatttggcatatatggtgtgccttgcagtaagttaaatgtgctcatattgccaccgataatatctcccgtagcttctccttcctgaattgaaacgtatccttcatttttaataaattctcgattttcctgatctatataccaagaatcatcgctccatgtttcagatggcaggacttcaataggctcattagaagttaagcactttaaaaagtaatcggttgtatactcgagccctttctccattccaaaggaagagaaatggggtcctgaatatgtaacgagacctgtttttgcgtaaattgcattatttaaagcagtaatatctgaataaccacagaaaaatttcgggtttttatgaattagatcataatcgagatgtttcaataaaccattggagttgtatccgccaagtgtcgtcaaaatagcttttacattagggtctccaaatgctttatggaggtcttgaatgcgggaagaaatagaagaggaagcaaatcgatctatctcatcggcatattttgagaatgtaacttgaaagcccatgtcggttaatctctttatagcaagttttctattttcatttgaaacaatacttaaactacacgatggtgaaatcactcgtatttcatcacccttttttaactttgttggtatcactatattcacctctttaattgaaagaatatttagatttaaaaaatattttatcgtatgaaataaagtagaagtgaattattttttgaaatggagttttcctgatttttcagcagacagacagagtctttttttgatatgataggaaaagtgatttattataagtagtatttaatatctataacatttgaaaggtgtgcaagacgtggagaaacaacttgcaggcttgccggtacacgttcatttcgtaacagaaatccgtgaaggggcgaggaaggaaaccgttgcttttgaagcaaatggtcaatactatgtaaaaggtcaaggtacatatgtaacattccaggagccgaacgaacaaggcgaagtgaaaacaattattaaaattcaagatgaacaagttctcattatgcgttcaggtgctgtttctatgcgtcagacgcatgtgaaaggtgaatggacaactggtacgtatacgagtgaacttggtacgtttgcattgcaaacaaagactgataacgttctttttaaatggtcggatgaaaagaaaaaaggacaactcttcttaacttacgcattgcttctaagtgaacaagaagctggcagatatactattacaattaatttgaaggaggcaaaataatgaattccttagaacaagtaaaaggattgattaaagaagaaattcaggctgctgtattaaaggcagaattagcgacagaagaacagattccaaacgttgtattagaatctccaaaagataaaacaaatggtgacttctctacaaatatggcaatgcaacttgcacgcgttgcgaaaaaagcacctcgtatgattgcagaagaactagttgcaaacttcgataaagcaaaagcttctattgaaaaaatcgaaatcgctggtcctggttttattaacttctatatggataatagctacttaacagatttaattccaacaatcgtaaacgctggtgaagcttacggtgaaacgaatactggtaaaggtgaaaaagtacaagttgagttcgtatctgctaatccaacaggtgaccttcacttaggacatgcacgtggtgcggcagtaggtgacactttatgtaacctattagcaaaagcaggctacgatgtatctcgtgagtactacattaatgatgctggtaaccaaattcataacttagctctttctgttgaagctcgttacatgcaagctttaggcttagataaagaaatgccagaagacggttaccatggtgcggatatcattggaattggtaaacgtttagcagaagaattcggcgatcgttatgcgaaagctgatgaaaaagaaagctatgaattctaccgtgagtacggtttaaaatatgaattagcaaaacttcaaaaagacttagaaagcttccgcgttaaatttgatgtatggttctcagaaacatcactatacaaaaacggaaaaatcgatcaagctcttgctgtattaaaagagcgtgaagagatctttgaagaagacggcgcaacttggttccgttcaatgacttacggcgatgacaaaaatcgtgtattaattaaaaacgacggttcttacacatacttaacgccagatatcgcgtatcaccgtgataaattagagcgtggttttgataagttaatcaacatttggggtgctgaccaccacggttacattcctcgtatgaaggctgctattcaagcacttggttacgataaagacacgcttgaagtagaaatcatccaaatggtacaactataccaaaatggtgaaaaaatgaagatgagtaagcgtacgggtaaagcagttacacttcgtgagcttatggaagaagtaggcgtggacgcaatgcgttacttcttcgcaatgcgtagcggtgattctcatttagacttcgatatggacttagctgtatcaaaatctaatgaaaacccagtatactatgcacaatatgctcatgctcgcgtatgcagtatccttcgtcaaggcgaagaattaggattagctgtagatggagatgtgaactataaacttgttacttctgagaaagaagtagagttactgaaaaaacttggtgaattcccagcggtagttgcggatgcagcacaaaaacgtctaccacaccgtattacaaactatgcatttgaattagcagcaacattacacagcttctacaatgcagaaaaagtattaaaccaagataacttagaattaagtaaagctcgttatgagttaatgaaagcagtacgcactacacttcaaaatgcattagcaatcgtaggagtatctgcaccagaaaaaatgtaatgaagaaaagcggaagcggctcgtttagaataggagggggatggagctcctgacagagaggtgtactttgcctcggaggaaggcgcgaagccaccgagtattctagccgctggaactggacaataaagaaaagcggagccgactgtttagtcccgaaggctaaggttctttcccacagaagatgcattttatcttctcgtggggaaggttcttagacagaaggggctaggaggcagagctggacataaagaaaagcggaagcggactttcgtttttaaataaaaggcaatcacacgatgttgtgattgcctttttatgtggagataataaaaaaaatttatcaaacaaaaggggaatttgcgtcgtcttatataaatgacaggaggcttatgatggaagaaaagatagaagaattaattgatatatataagcagcaaatatattccttatgctataagttagcgaaaacgaaagaagatgcggaagatatttttcaagagacgtggataaaggttttttcatcaaggcaccaacttttttatgtggataattataaaaagtggattactacaatttgcgttcgtacattttatgacttttaccgcaagaagaaaagatggaaagatcgcgtcttagatttatttcataaagaagatggtggagaaatagatttcgcagatgatgtgaatatatcagaagaatttattcaaaaagtggaagcggaaatgatacgggaagttatacagctattgaatgaaaaatataaaaccgtgctcgtactctactattatgaacaatactcttataaagaaatgagcgaaatattaaatataccgattggtacagtgaaatatcgccttaattatgcgaagaagcaaatgcgagaacatttggaggggttcgtttatgacagaagataaatttgaacagaaggtaaagagtagcttagcagaagagataactccaagcgaagagctaataaataacacgaagcagggcgtgcgaaaggctcagaagttagagaggaaatggatgatttgtattcacaccatttggattgttttgttaacaattgttatagaacaatttgtcacacatttggattataaaattcctatgttgatagccattgtgattatgatgcatgtatacattccgatatatgttgtaatacagtcatttttaaagaaggagtatagattacatgaaagagttcgctaatccgtttgtactatttgaagtagctggagtgacgatgtttttagcttttatagcacttttaatatgtgttgcatcatgggtatatacagatgctaaagcacatcaaatgagcaaaggatggagtattttagcagttatattgccattctttattgggtttttattatatatggtaagaagaagtaaaaagaaggttgaaggagaatgtaaggtgaattttgttaaaaaacagaaagtaacattagttgcgatattggcaagcacaatgtttgtattacttagtgcttttacttttgcacaaacgttagatgatgcatggagagccggggatatatatttagcaaatgagaagcaagggaaaacaagttatgaggcaaaattctcatcatgggatattgccagtaaggatattgaatttcagtatgaaaaggatacagaagtgacattttcttatgagacagatgcaaaacgaggaaacttatgttttagtgtgtatgaaagacaaggagaaggtataaaagagttaaaggaaatttgtgaatcgaaaaaaggtacttttacagttactttaaaagcaaatgaagaatatgtattgaatataagcggattaacagtaaaagatggatttgtaaaagtgaattggcaagagaaataaaaggggccctataaaggacctcttttttattgaatagtataagtaacagaaaaactaacaggactatagtaaacgtaaggtgcatgaaattgaacatacatatttccatctgtttttgcagtgaaaattcggccgtaaccatcagaataacgtccaattaggttatgatttgagtcataaacactgtaactaggagttttgctgttaggatgaattgttagttcttgtcctttttgaaggaaaataggttcttgttcagaactacctccagtttgcaaagaataaaattttgtaaagctttgttcttgagcggcagcagcgacttttgtttcaggaataaacgcagtagctccagtaattcctgctaaagttaatgcacctgctaaaatcatttttttcataatagaaaaagcctccttattagttgtaatcagttttgttacaattaatattgtatacgataatgggtaggataaaatatgcttttatgcatatatattttttctcaataaaagaccaccgataaatgaagtgcaccccaattgttagacacataactaacaattggaggtgcattttttagaataacgttttttgacacttgggggtagtgcaaattcttaagttgatgggcatgggggcttaccatgaaattcattacttttttcgtcggattaattattgttttcttgctcgcttatattgctagcaataataagaagcatattaaatttaaaccaatttttatcatgcttattatacagttaattttaacctatttactattaaatacagaaatcggcctcatacttattagaatcatttccagtttgtttacaaagctactcgagtatgctgctgatggagtaaattttgtatttggtggtcttgcaaataaaggtgaaatgccatttttccttactgtattattaccaatcgtctttatttctgttttaattggtatattacaacatttcaaaatactaccattttttattcattggatcgggtactttcttagtaaaataaatggtcttgggaaattagaatcttacaacgctatcgcctctgccattgtcggccaatcagaagtttttattacagtgaaaaaacaattagctcaaattccaaaacaccgtctttatacactttgtgcctccgctatgtcaaccgtatctatgtctatcgtaggtgcctatatgacaatgattgaacctaaatatgtagtaactgcactcgttctcaatttatttagcggttttattatcgtactcatcattaacccttacgacgttaaagatgacgaagatattttagaaatcaaaggtgaaaaacaaagcttttttgaaatgcttggagaatatattcttgatggttttcgtgtagccattgttgtcggcgctatgctcatcggatttgtcgcattaattagttgtattaatgacttgttcctcattatattcggtattacgttccaacaattaattggctacgtatttgcacctatcgcattccttatcggtgtaccaagctctgaaattgtagcagctggtagcattatggcaacgaagcttgtaacgaatgaatttgtcgcaatgatggaccttagtaaaatttctaatagcctttctccccgtacagttggtattatttctgttttccttgtatcttttgccaatttctcttccattggtattatttcaggtgcggtaaaaggactaaacgaagaacaaggaaacgttgttgcgaggtttggccttaaattactatatggagctactctcgttagtattttatctgcaattatcgtaagcattatgttgtaattaggtaaaattttatcattttcttatccctatcttttgtatacaataacgaataggtgtcttataaagtgaaactttaatcagagtggggctatccccactctgattattagccttcatcaatcgggtatttacgggcagttatctcccacctaacttcattgtattcactggactttgaggtgggcgttttactgctcgttaataccggataaataatcaagacatctattttttatacatgtacaatcgcttttatttagcgtaaaatattttttatgtgtttgaatacacttctaaatgtatacactttgatagttttaaaggagaaaaaatgatgaaatccgacacgaacaacgatacgcgagccaaaaaaggacgctcaaagaaaaaacgcctactttggttccttcttattccattactaattgtagcacttggagcaggaggctactccttccatatatacagtaaagcaaagtccgtcttaaataatgcttatgctgaactaggtcgaggagaaaagtccagtaaacgtgaaaaagctgttaaacctatgaccgacaacatttccgtactaattatgggtgttgatgaaagtgatattagggaaaaagattatggaaaagcaactcgaacagatgcgttattacttgcaacaattaataaaaacgataaatccgttaaacttgtaagcattccacgtgactcacgcgtctacattaaatcacgtgataaatacgataaaatcacacatgcgcacgtattcggtggtgtagacagcacaattgatacggtagagaactttttagatgttccagttgattattatgtaaaattcaattttaaatcctttattaaaattgttgattctcttggtggcattactgtggacgttccagttgaattcacagagcaaaatagtaaagatgaagcagatgcaattcatctaaaaaaaggacgtcaacatttaaatggagaagaggcactggcactagctagaactcgtcacatcgatagtgattatatgcgtggccaacgacaacagcttgtattagaggccattgctgaaaaggcactatctcttaattccattaataaaatcggtggcctactagacgctgtcgataaagacttaaaaaccaatttaacttttgatgatatgatgacaattacaaaaaattcaatggattcaaatttaaagatggaaaaaatgcaagtagaaggtacagataaatatataggtggtatttattattacgtgccaaatgaaaaaagcgtcgatactatttcaactacccttcaaaaacatctcggtgttacgaataaaaatgaacataaaaaattataataaaaaggctgctagatcattctagacagcctttttattatatttttcaacatatttttcatacacattgtgacaagaagtgacaattattacagcgatgtaacattttttatgaaaaaattacacacacagtgaaaataatagtatactagtacgtacataatgttattttcatcatttttatacaaaaaatgtaatacatatatttatacataaatttctggggggaaataaatgaagctaagtaaaatactgattggttctgcaattgctgggggcatattactttgtgtaggcggtgttgggggatatcaatatgtatccaaattaaataatcaattagatactactgcattaccaaatactacatttgaaggtatttctctcgatggaaaaaataagaaagatattcaagcaattattaatcaaagggtaactgaattagatcaaaaatcccttacctacatattccaaaacgataaacaaacttacacatggaaagatttaggggtaaattataaagagaaagatattattgacaaaatcttcaaagaacaagaaggaaacgtaatgaatcgttacaaaatgcgcaagcaagctgaaaacggtgaattaaaacgtgactataaattaacaccacaattaaatgcaacagcttatgaaacctttataaaagataaatataatgaaacattaaaaaatcctgttaatgcagaattaagcattgaaggctcaacagtaaatgttagtcaaagccaaaacggagaaaaaattgataaaggaaaactaaacagtttaacaaacgaagctattactactggtaaatcagatgttacattaccagttacattcataaaaccagaacgttctacagaagatatacagaaaatgggtattaaagaagtcattgctgaatattctactccaatggctggccgtaacggaaatcaatcatttaacgtaaataagtcagctaatactttaagtggggttattgtggcacctgatgaaacatttagttttaacggccgcgttggcgtaactgatgctgcacatggttacaaatctgcagcagtatattcacaaggtaaagtaatacaaagtgcaggcggaggagtttgccaagtcagtagtactttatacagcgccgctttaagggctgatttaggaattgtttctcgaagcaatcattctatgccagtaaattatttaccacttgggcaagatgcagcagtagcagattatggtccagatttaaaatttaaaaataatacaggcaattatatttatattcaagcattttcaaatggaggtagtattactacacgcattttcggtacaaatactggtaaaaatgttgaagtttcttctcaagtaattagtaggactagtgataaaatcacagcggttacgtataaaaaagtaacacaaaacggggaagtaatatcaaatggacaaatttcaaaaagtgtatataaaagcgccccaaaggaatagatactatcaaccgaatagtataaagaaaaaggcgtgattaaatcacgcctttttcttttgcagtaatagtaaaaaagtttcaagatggtctttcgtttcttctaaagaccacatacgatttccttgcttcgcagctaatacacacgcctcttcccacgcgttctttttcttcatatttattaattcatcacgtaatttcaaaacaatttcttcgtcttcttgttcaataaactcttccatcacgcttactatttcatcctcatgaatacttaacgtacagtacgatttaagaaagtattgtaatgtcgtatacataatgtactcccccttcttatttatcagatggataagaagtaataatcttaaaccctaattcccctgacttatctcttgctaaaacagtaacagtttttactaacttgtcttttacactcatatttttctttattaccgtttttccaacagggaatgaatgagttgtatttaatacgagacgagcctctttagaattttttaaccaatcttgaatttccttgtcatgttgcttcaagctatcttttacagctttcgtcgctgtttctttatcatagtatgtacttgcggctgacactttatctgtcttcaagcgattcttcaaatcctcttctgacttgcctacatgtctttcaatcgtatgaccatttttaggtggtccttccatttcatctaaaatattatcactaattttttctaccgatgcagcttgattccctgtctgtttctctgatttttgttcttttcctgcacatccacttaagatcagcattaatgccaataaactactgaagaaaagactacttattcgtttcatcatatcacctcttccatgattattatcgcaacttcactaaaagtcaatttcacaacgaaaaaatctatcatttttcatttttttcatctgtttttccatatttaccgcgcaatttcatcaaccctctatttttcgccttttataatatataccccctatattttataattatttcccagataaaatcgccaataacataactataaaactcttttatacaaaggtttttatagtgtttttaaaaataatttaaaatacccctgtttttatatacataatacctgtataaggtataaacaccattcttatcaacgtttttctacattatgtaaatttacccttgcctatacaaacgaaatgtggtgtaatgcaaaaaaagataaaggattttaaacaatggctgaaacgattcaaaatttcttaacagaatactattcaatcgcaattccacttagtatcttaattaacatcatcattagtcttttaggtgttattcctagcatctttttaaccgccattaacatacagctcttcggtgtaaccaatggcacaatcatttcgatcgcaggtgaggccttaggggctattatctcgttttatatttatcgcatgggccttcaaaagttcactcacgataaagtcaataagtacccaaaggtagagcgtcttctttatgtagaaggtagagaggcctttctactcgttctatcgtttcgattgatacctttcatcccatcaagtatcgttactttatttgcagctctagggaaaatgtcattactctccttcagtattgccagtacaataggtaaaataccggccttattgattgaagtatattcggcataccaagtcatgaacggaacaaatgaagcgaagtgggttgtaacaatcgcaggcgttattggattgttttatttgtggaaaaaatggagaaaaaaataaagaaggagcataggctccttctttatttttgaggtattttattaatagctatccgttaagtccttagttaataccaacagcactaaatgattgcttaactgctgctacttcagcagaatttgcaccatataagtctgctgcagcttgtactgcaccagcacgagcttgactaaatgtagtagattgcgtgaaatactgtgtatttgcacggtagtaaatcgcacctaatttatctttgccgataccatttacagttacaccgtaatgcgtaccgccatttgctaataaataagcttgtttattaataatgccgctgtttgtatgaacgccaccgttatcacttgaaccagtgtaacgcttagaataatggtctggatcaccatacttcgtaggatcactcatagagcgaagcgcgtctcctgctttaccaggtgtgtaaatatcttcaccaatctcccaatccgggttacggttatcatagaattctactaaagtaccaaagatatcagaaatcgcttcatttaaagcccctgattcattttgataaattagatttgaactattttccgtaacagcatgcgttaactcgtgaccaattacatcaattccaccagataatgaagtaaatgttacaccatcaccatctccgtataccatctgtgatccgttccagaatgcattgttataattacttccgtaatgaactgttgattttaacggcgctcctgcatcattaattgaattacgattaaatgtattcttatagtaatcatacgtgatacccgcatagtaatgagcatctaccgctgctgcatcatacgctgcattgaaaacattatctgcatctgcccataatgttcctggtaatgttgaacggtttttcgcatcatatgtgaaaatcgttgccccgcgtgtattatcttgtaagtagtaagatgatccagataacgttgtattaagagacttcgtatctcctagtacgcctttaccagttcctactttattcgttcctgttacaggctttacaacagctttcgcatcctgtttaggagcctcttgcttaactggtgacttatcatcattcgtcacatgatcaattgtattaaacttatttaatactttaccgctgtctgcctcaatgaaatagtagtagtttcctgggcttggatctaagaagtttagatttacaacatatgcatatgttgtttcctcaccgttttgatatacatataagtccgcttttggttctacttcatatttcggtgttacccctaaatcttgctgcgcgatttcaattgcttttgcgccttcaatcttatttttatttttcaacttttcctttttgtctaaatcaggtgcaactgttccagacaatacttttaaagaaccgtccttacttacgtgagctacttgagtagaaccccatacaggcactccttcgtaaacttgttgcatacgtactactgttgaatcagttacagcatctttcttcacttgtttcactttgaaagaatcttgtgcactcttttcccctagcttgtaatcaccttttgctgcgtttaagtaatcaaacacaacagattctgctttcttgccagttgcttcagttagatcaccagaaataaactcaggtgactgcaccgtctcattgtacttcttagtagagagcacatttttagaatccgcaaacgcagagcctgtccctccaaacgttgtaactgccattcctgtcgctaacactaatgctaaactcttctttttcatataaccttccccctaataaaaaattttttgaaaaagagtagtttcatattagcattatgtttccactattaatatactaaaaattcaattaatttatttctcaagttttgtagaattttgaggaacaaatattgaaaaaacccctttccgattggaaaggggttttttcaatattttcttaaccataaatatctggattagagtaatttataaccttttcttctgaaaatttaaaaccgtaaatatctgggttagaatattttatactactttcttttaaagcgtttaatccataaatatctggattagagtaatttactgagccttcttttaaagactttaccccatatatgtctggatttgaataattaacgcctaaagaaagaatcgctactattccaagccctactgcaccataaatgcgctttttcaattcaattcctccttttcttctaaaactttaataacttctttataatatttattactttcctcatacttaaattcattctctaaatacatagctaattctaaataagcattttttaattccttcatactacctacactcttaaaaaacggaatagcctcattctctaaaaatctcttaaattcttgagattctccaaaatatttatacttaaatatacagaatgaataaatcattttattgtatttctcatcactccgtgagcaatcaattcctttttctatccattcctgcgcttcttcataacgtttaagatgaatgtattgcttagccagtccataaattgtttcaatataattcatattgacagtcttctgcaattcgaaactttgaagaaaatagtctttagatttatcatgctcatttttataatggtataattcccccatattatttaaagtcatagctttaatcatatctttttccgcaaaagaatctacttctcttaatatactctcataaatctttagagcttcttcatattgtgctttttcaacataacttaaagcaataatcgtttgacaatttattacataacggaatttatattcgttacggaacccctccatggcaatatgagcaaaatgcatggctaaatgtggtatatttagatgactatacgcaagacttaggttataatatatccccgtttcataatatccttgctctttagccatttcttctgtttcaattaaatattttaaactttccttatgcttatattgcaaactaagtaataatgccttactgtacgtatacaataacttttgaaagggtgagtatttcttgtacactttcttcaatctgtccaattcttcttcaagagcaggtagatctcgcttcatcattaaataacgtgtatacagcagtttataataatttataatttcaaaatccaacacatgcttcatttcaccttgcaactcttcatatatacgttctacttgttgcttgtccaaatgaactagtgcattcaaccattcatccagcttccccttcacatcttcttctacatctctcaaatccgtcacagcaatttctaatcttgcgcagagcaattgtagaatttcttctgatgcttcgatctttccattttcgatcttacttaagtatgagacagaacaaatgccctgacataattcttcttgtgtcattttttgctgaagccgtttgtaaaagacttgtttgcctattttttctaatgtttgttgcattgtcctcctccattctcattaccccattactctaataatacataaaatttggagaaatataaattgataaatataaattttctaaaaaatatgcataatttcatttttttctctcttgacttcacatcaatatctcttctttgctaccaatggtgaaaaattggtatactataaccaaattatggaggtgttctcgcgatgactcattataaagacgatagttatgccttacatacagacctatatcaaatcaacatggcttatacatattggaaagatggtattcataatcgccgttctgtttttgatttatattttcgaaagcttccatttgagaacggttacgctgtttttgctggccttgagaaaattgtagagtacattgaaaatttcagttttactgaaagcgatatcgcttatttagcagaattacaatttgaagaagaattccttcattatttacaaaatatgaaattcactgggacgattcgtagtatgcaagaaggtgaagttgtatttaataacgagcctttattacgtgttgatgcaccacttggtgaagcacaaattattgagactgccctcttaaatattgtgaattaccaaacattaattgcaacaaaagcagcacgtatgaaacatgctgcaagtaatgatgagcttttagagttcggcacaagacgtgcccatgagttcgatgctgccctttgggggacgcgtgctgcctttattggtggtttctcctctacaagcaacgttcgtgctgggaaacgctttgggatccctgtagctggcacacacgctcactctttcgttcaagcatatcgcgatgaatacgtcgcgtttaaaaaatacgctgaaactcataaaaagtgcgtctttctcgttgatacatatgacacattgaaatctggtgttccaaatgcaattcgtgttgcaaaagaatttggggatcgtattgatttctatggcatacgtcttgatagtggtgatatggcttatttatcgaaaaaggcacgaaaactattagatgaagcagggtttacaaatacaaaaattatcgcttctagcgatttagatgaatacacaattatgcaccttaaatctcaaggagcaaaaattgacgtatggggcgttgggacaaaattaattacgtcctttgagcaacctgcattgggggctgtttacaaactagttgcgattgaagatactgacggaaaattaaatgatacgattaaaatttcatctaaccctgaaaaaattaccactccaggactgaaacgaatttatcgtattatcaatcgggtaaatgatcatgcagaaggcgattatattgcattagattctgaagaacctggaaaagaagagcgcttaaaaatgttccatccagttcacacatatataagtaaattcgtaacaaactttgaagcccgtgaactgcataaagatattttcgttaacggtgaaagaacatatgaactaccaagtatattagatattcaaaaatataatgaacagagtctctctctattttgggaagaatatatgcgaactttaaatcctgaagaataccctgtcgatttaagccaagagtgctgggatcataaaatgaattacattcaaacagttcgagaacaagtcgaaaaaaacatacaaaagtaaacagagaagtttccccttctctgttttttcaatactatatggatatttgtaaaaaatatattaaaagaataagacgaatgtattttatttgtaaattttaatataacgctatttaaaagtaaaataatatttggtattattttattgagtcaatttcaacaaaatcaccaataaaaaagaggacgcgggtcgcgtcctcttttttataaatctttcactcttaatacacgcattgcatttaacactgcaagtagtgtcacaccaacatctgagaaaacagcttcccacattgttgcaataccaaaagcaccaagtaataaaacgatcccttttacacctagagcaaagatgatattttgccacactatacttcttgtacgttttgcaatttttacagctgtcgcaatttttgaaggctcatcagtcataataacgatgtctgccgcttcaattgctgcatctgatcctaaaccacccatcgcaataccaacgtctgcacgggctaatactggtgtatcgttaataccgtcaccaacgaaggcaattttttcttttccgtgcttcgctgcatcaattttttcaatctcttctactttttgttgcggtagtaattccgcatgaacttcatctaagcctaattctttaccgacagcttcaccaactggttttgcatcaccagttaacattactgtctttttaatacctagttcttttaacttttgaatcgcttgtttcgaatcctcttttacctcatcagagataacaatataacctgcatatcttccatctacagcaacgtgaactaatgtacctactgtttctggttgcttaaattcaatattttcttttctcattaattttgcattacctgcaaaaatttcttttccttgtacttttacgactgtaccgtgaccagaaatttcgttataatcatcgattattttttcatcaattgattttccatatgcctttcgaatagattgggcaattggatggttagaatatacttcagcaaatgccgcatactctaataactcttcacttgtagtaccttcgctcggttccatttttgtaactttgaaaacaccttttgttaatgttcctgttttgtcaaaaacaatatattttacatcatttaaagcttctaaatagttactaccttttactaacacaccacttttagatgcaccaccaatacctccaaagaatccaagaggaatggatacaactaacgcacatggacaagagattactaagaacactaaagctctataaatccactcagagaatgtagctccttctaaaataagtggtggaataaacgccatgatcgccgctgtaataactacaactggagtgtagtaacgtgcaaacttcgtaataaagttttccgttggtgcttttttactgcttgcattttgaactaaatctaaaattttcgatacagtggattcaccgaattcttttgtaacttcaattgtcaacacaccgttttggttcacaaagccacttaatacatcatttccaacttcaacttcacgtggtacagattcacctgttaatgctgaagtatctaccattgatgttccttcaattacttttccgtctaacggcaccttctcacctggcttaacgataatataatcgccaatttgtacatcttctggtgatacttgtttcgtttcatttccaacctttacattcgcataatcaggacgaatatccattaatgaagtaattgattttcgggagcggtttaccgcaatactttggaatagttctcctacttgataaaatagcattactgctacagcttcagaatattgttgaattgcaaaagctcctacagttgcaattgccattaagaagttttcatcaaatacttggccacgagttatgtttcttatcgctctccaaacgatatctccacctattaataaataagcaaggacaaataacggaattgttaccatttgtggtaagcccgctaatgcagcaattgctgtcaaaattccgccgaccactaatctccctaccatctttttcacatttgcttcaccatgatcgtgactatgtccgtggtcatgaccgttcttctcttcacgaacaactttcacatctggttctaacttttgaacgacatttgttatatttgctacagtcgcttctagttctcttttattcgcaacttctactcgtaatttcttcgatacgaaatcaacagttgcttctgagacagctggcatttccttcactttattttcaattttcattgcacagttcgcgcgatctaaaccttctaatataaatacttctttagcaattttatttttttgttcttcttgaactttaatatgcggttctaattttgtaacgagttgttttgcttccgtaacaacttcgttttctttattttgtgctgtttctaagatcattgtctttgttgcgaagtttacagagcaagaatttactccttctatattcccaacacctttttcaattttcattgcacagttcgcacaatctaaaccttctaacatcagtttctttttcaccaatgcttcagccatcgttctccctcctcgcgttcttttattcttcttcgtttacgtgttcaaacgcttgctcgaagatatgaattacgtgctggtcagctaacgaataataaacaacctttccttctttacgattcttcacaagtttcgcttgctttaacacacgaagctgatgcgaaatagatgattgtgtcattcctaataaataagctaaatcacaaacgcacatttcagcttcaaatagcgcatgtaatattctcgtacgtgtacggtcacctaatactttaaatagttctgctactttacttaaactttcatcagttggaattgtttgttttacttgctctacaacttcttcatgaattatcgtttgagaacatgtctcttgtggtgtttctactttatttccagccattatagctcacctctttaattgaacatatgaacaatcattcatatatcttatactcttattatatgagcgcccactcatatgtgtcaatgaaatctgaattttttttatgaacattccgttcacattttaataagtcgtatacatatttttcgcactctctatattctcatacaaaaaaggatgcacaattcgcacccccctttttacttacttttcatttttcaccgcatccacaattaaagaaacaaatcctaaatgattatcccgatttctatggtcaaaacgtttcgaacgataaataaatccatctttctcattccaatcattatagtgaaacttaccattctcatcacagtattctaagagccttacttgaaaacctgctgattcaaacatggacgtgattgttttatagctatgaacaattttatgacttgctgcaggatgatctaatggaccaggtccacctacttgtaccccttgctgatattcttcatctggaaaaaatgcatctggtactgcacaacgaatatatccattctccattaaaaactcataacaaatttttgcagcttcaattccttcttcatatgataaatgctcccatacatgttctgccaaaattactgataaagaattaggttgaaatttatcaagccaagcttctctccgtaataaatttaattcttcttcattcgtatgtaaccaaccagggttattattataaccctctgctccaacaacaacttttgcttcttccatttcgctcccacccttttttcatattccgacagaaaaattcgacaaaataatatacattccctttatttcaacaaaagaaaaagccttgcgcgctccctagacgcacaaggcttactgtgtttatatccctttaattagcttgttctaaattatcctgcgaacttccatcgtcttttaaatgactatgttttttcgaataaacaaagtatacaactactccgattgctaaccaagcaccgaagtacatccatgtttttaatggtaggtttaccattaagaatagacaacatgcaattgaaataatcggcaagatcggtacaagtggtaccataaatccacgttgtaattttggatgtgttttacgaagaataataactgacacaccaaccatcgcaaatgttaacaacgctccaatattcgctaaattcgacaattctttcaaatcgataaatccagcaattaaagcactaccaattcctgttaaccaaactgtaaatgttggtgcttctgtctttttattaattttcgcgaaagattctggcaataaaccgtcacggctcatagcgaagaatacacgtgtcgttgcataaatgtaagcaaaaattactgccataataccaattacagctccaattgcgattataccagctactttatcttgtcctacaacttctaacacatacgccatcgcttccggtacatctagctctttatatgaaaccatacccgtcataacgagacaaactacaacataaatgattgtacaaatgactaacgaagcgataataccaatcggtagatcacgttgcggattttttacttcttcagcagaagttgctaatgcatcaaatcctaagaaagcaaagaatactgctgctccccccgcgaaaactccacttaaaccatacggtgcaaatggtatccagttttctggtttcacgtagaatacaccaactgcaatgaataaaacaacgataccaattttaattaataccattatgttattcactcgtttactttctttcgtacctcttgataataaccaagttataactaatgtaacgataactgctggtaaattcactataccaccttgagacggaatcgttagcagtgcttttggaatttcaagccctaatccactcactaagttatggaagtaaccagtccatccgccagctactgcggcagtcgttacaacatatacggatagtaatgtccatcccattaaatgagctacaaactcaccaattgttgcatatgagtatgtgtacacactacctgaaacaggaagtgtagaagcaacctctgcgtaacataatgctgcaaatccacaaacgatggctgcaatcatgaatgaaaaaataactgctggaccagcatctcttgctgctactaatccagttaatactagaactcctgtaccaattatcgcaccaatccctagcattgttaggtcaaatgcccctagcgttttcgtcaaagttttacttttactttcccctaacaattgcgtaacggatttctttttaaataggttggccacgatgtatgcccccttttgccaagaagagctaagagatcttcactcttagcccttatcatgttgttttatatattgttcgattttgttttgtataatgcttctattagcaagatactgtttctgcttctaataattctttagcacctttgtactctacaccgtgagcttctgcaactgcttcgaatgttacatagccatctaatgtgttaataccttttagtaatgcagtgttacctaggcaagcttctttgtagcctttgttagcaatttgtactgcatatggtactgttacgtttgttaatgcaagagttgatgtacgtggaaccgcacctggcatgtttgcaactgcataatgaacaacgccgtgtttttcataagttgggttatcatgagttgtaatacgatcagttgtttcgaaaataccaccttggtcaatcgcgatatctacaacaacagaacctggttccattgatttaatcatttcttctgttacaagttttggagcttttgcacctgggattaatactgcaccgattacaagatcagactctttaacagcttctgcaatattgtaaggattagacattaaagtttttacttggtttccgaaaatgtcatctaattgacgaagacgttctgcacttaagtcgatgattgttacatccgcacctagtccaactgcaattttagcagcatttgtaccagcttgtccaccaccgatgattgttactttaccacgtttaacccctggaacacctgcaagtaagatacctttaccgcctttatttttctcaaggaattgtgcaccaatttgcgcagccatacgaccagctacttcactcataggtgcaagtaatggtaatgaacggttttctaattgtactgtttcatatgcgatagaaacaacttttttctcgattaaagcttttgttaattctggctctggagctaagtgtaagtatgtgaataagattaagccttcactgaagtgtttgtattcgctttcaattggttccttaactttcataaccatttccatgttccaagcttcttcagctgtatcaacaatttttgctcccgcttccacatactgagcgtctgtgaaaccagaccctaaacctgcacccttttgaatgaatacttcgtgattgttacgaattaaatgtacaacacctgctggtgtcattgccacacggttttcgttgtttttaatttctgctggtaccccaatacgcataatgaaatgcccccttataattaacagaaaaaagagattcttttttctttttgtaataattaataacttatgtccttattctagcataacttaaaagttatgaaaacgctaacataccattttactaaagtttttatatttagaatagtgtaaatatataaaacattgattctattaggtgtttcgtgtcatttcattatctttcactctatttttattatactgcttcaaaataaacagcaatcatttattatttgacaataatgtaacaatgtaagaaacctaagcgataacgtatacatatacagttattactttactcaatactttagagatatattcttttcacaaaaaaacagctactagcatttagccagcagctgggtaacttataaataacttagaaaataaatcatctgtcgtttcagtaattttatcaaacagatcactttcttccgcttcttgctcttttaacatcttaattgtttcacgtgcatcttcagggtaatcggttatgataccatctacgttcaacttataatatgcctttaaattttccatatcatttactgtccatacgtaaattggtttgtttaacttccttgcttcttttactaatttcttatttaacatatattcttctgctacgtaaaagtcagccttcacattctttaagttagctctacttgcatacaatatataccctacttttatatctggatttgcacgcttaaactctttaataagtggatagtgtaacgtttgaattacacattgcttctcaaattcattatctttaatcgtttttaagactttgtttacaaaatctttttcgcccccatgaagcttcacttctatattaagtttgattttgccatttgctagcttaatgatttcatcaagtgtacttatttgtcctgaaagtccatcttgactaagggtaagttgccttaactccgccatcgttaaatctgacacatgcacattggcatttgcgagacgtttcagcttcaaatcatgtataaccgctagttcaccgtctttcgtttgtaatacatctatttcagcgtagtctgcttttgcatcaatcgcaccttgcacagcttctttcgtattttctacgccttttgatatatacccgcggtgcgccataataatcggttctttatacgaatttgaaataaacgttacaatgaaggcaacgaccattccggcagtaataattcctacaatgtatacgccaatgaatttccaacgatgtttttggaaaaaacatttatctgctttcgttttcgaataatctaatccttcttctaataaaacatcctcaaccggtaccttttgtaagtataatcgcgtaatcgccataatataaaatggcgtcacgataaagctgaataaatacaatgtgctcgttaaaaatacagaaatcgttgattcagctaataatgcaaatgttcctttcgggtttgtaaattcataaacaccccataggcacaataaatatattcccaaaaacacgacatatacaattccaattgaaataaaaaaccctactaaaaagaatagtactttaaaaaagctttcctttactaaagttgcacttttacgtgctgccacgcgaaatggtttttgctctaaaacaacaataggtagaacgaaaatccatcgaagattcaaatacgcgactacagcaaagaacgtgtaataaccaacttgtcccatcgttgtcttaaacagttctcctgtaataaagttaggaatttgaatttgcgggattaatgccgtttcatatcccatatttaaaagaggcaacaatacgacagcatataaaataaatcctggtaagcaatatgtaaaaagagtaggtaaatacgttaccgttttatataaaatcggacgtaatttcaccttctgtcttttatgagcgaaatacgaaataataataagcaccgcaaattctgtaaagataagaaacagtgctaacaatgataaaattacgattgctaagatcccataaggcgtctttaaaaacgctaataattcatcatttgtcgcatttgcataaccaccaaaatacaataacttattaaaaatgattccaaatagtggaacaaacacaatcgctgctaataatttataagcaagttgaaaagttaatacattccaaaaagcaaatttaactgtttgaaaggaatgtcctattactcctggtatagatagttttttacggtgttgcatatattcctccacattctaaaacgatatttgagatggattccatatttccagttctaatccatctttttaataataatatattccgcttaacatgaacactcttatacatataatgaaaaaagtgatggctacttcccatcactttttcatttattctattttttctctagcccttgtccaaatgctttcaagaagctaaaaccgaatgtaatagctctattgatatctggatcttttaatactttaaagaaatccatcacttttgtttttttaccactatttaattcatctgttgcaaattgcaatcctgtaactaaactggacgtaatttgcttcgttatttctgggtcaactgaagataacgcttctcctgcccccatcatattgttgagtgcatttttaactggttcacgatttaattgctccacagcgatttttgaaacatcttccttcgcagcaagtaaactaatcgctgcatctaatatgccagccttctgcaactgtgctaaaagctgcatcgtttcttctactgcttcacgattattagatagctcatttagaagttcatctgctaattgctgtttctgttcttcctctgttacaactttctttttaattatagtaatttctttcgccactatctccgccccctagtccacaagtgatacgtattgttttctttgccatttttgctggatttcaacaccattttgcggattacgctttttatctctcgggtttgaagatggtaacggacgattccctttttcacgtagtacacgcatctttaccatcgtttgtttgtacgctggtgtacacgtataaagatctgtcgccgttccagttaaaatattgattgcctcttcatttaccgttgcatgcatcggtaaatatagctctttccccgttacacgatctgtaacaagtgcctgtactttaattttcccaaatggtgatgctaattctacaaggccaccatctttcacattgcgctctagggcaagttcaggcgagatttcaacgaacacttcagatactttagataaaataccagccgatttattcgtcatattcccttcatggaaatgttctaacatacgaccattatttaaaagtaaatcatactcatctggtgctacaactggtggtacccattcatctaatgatagacgagctagtttatctgggaagttaaatccgtccacatataatagcggtgtatcgctaccatcatggctaccccaacataaactattccatccttctaaacgatcgtatgttgcctgagaatataaaggtgcaagcgatgcaatttcatccatgatttcacttggattttcataattccagtccccgccaagtgcacgagctactttttgtaaaatccaccagtctggctttgaatcaccaagcggcttcaatacttcatataatctttgaatacggcgctctgtattcgtaaatgttccctctttttctaagcttggtgctgccggtaaaataacatcagcaaaacgagctgttttcgataagaacatatcttgaacaacaaggaaatctaaattcgctaaaatatgttgtacatggttggcattcgaatctactaaagccatttcttcacccataacatacataccacgcagttttccttcatctgccgcaagtaacattgcaatattatttaaacctggtgctttcggaattgtagtaccgtatgctttttcaaatttcgcacggagcgcatcatctgaaaccgcttggtaacctggaagccagtttggtaatgttgccatatcacaagcgccttgtacgttattatgtccgcgtaatggatatgctcctgcaccaggacgacgatagttacccgtaacaagcaatagatttgaaattgctgctgaagttgtacttcctccagtattttgagttacacccattccccaaagtacacaagtaccatctgcttcatataccatacgagccatttctttcagattttctttcgaaatccccgtaatttcttctgtataatcaagcgtatacttttctaccattttgctatattcatcaaaattcttcacattttcagctatgaactttttatcgtgccaatcttgatcaataatatatttcgtaataccagcgagccatacgtaatcagttccttggcgcggatgaatgaataaatccgcacgctctgccatttcatgtttacgaaggtctgccacaattaatttttggtcatgtaatttatgagcacgttttacacgcgttgcaagtacaggatgtccttctgttggatttgctccaacgataatgacaaggcctgcttccgcaatatctttcactgttccagcgtccccgcccataccgacagttttaaataaaccgtctgttgctggagattgacaataacgggaacaattgtctacattattcgttccatatatttgacgggctagtttttgcataagataattttcttcattcgttactttcgaagaagaaataaatccaaatgcatcacttccatattctgatttaatatgctgcatattggatgcaacaacttccagagcctcttcccatgaagcttcaacaaacgtatctccttggcgaattaatggctttgtaatacgatcttcactgtttacaaaatcccatccaaatttgccttttacacatgtggaaataccgttaaccggcgcatctgaaacaggctgcactttcaaaatgtggcggtctttcgtccatacttcaaatgaacaacctacaccacaaaatgtacaaactgtttttgttttattcactttcgtcttacgcatcgcagcctctacttctgaaactgctaaaatactactatatcccggctctacatcctttacaaaatcaatcatcggatctaacacatccggtttcaatcctgtcatgaatccagcttcacccagcattgttttttccattaacgcattacatggacatactgttacacactgcccacaacttacacaagatgagtcatttatacttacaccattgtcccatataacacgtggacggtctaagctccaatcaatcgatatagtttcattcacttgtaagttttgacatacttctacacactgcccacaagcaatacattgatttggatcatatcgataaaatggatgtgacatatccacttcacacgcacttacttttggctcatacggatatttctgttcctcaattcccatcatatgtactgtattatggactttacagttaccattattgttatcacaaacggtacaatacaatagatgattttctaatattcgatccattgcctcagtctgtgcctcttttgcacgctgggactgtctttcgatatgcataccgttctctaatttcgttgaacaagcacgcaataactttccatttacttctacaatacacgtatcacaagtttgaattggatctacttctggtacatgacaaatttgaggatgttccaaattactctcgttaaataattgtagtatcgtcttttcacctgatgcagaaaattctttaccatcgacggttacacggactgtctgttctgccatagtttcccctctccttacaaccaactgtacaacacaattatgaatccgttttcaaaatcgcattactgtacatatttttgaaacgctctacccaaatactttcttatgaagtcgattctagatgttataaggtataactacgaaagcttgaaaatatcactattctacagttctattatatcgtacatatacaataataaccaaaataatctgtgatcttctttttaataggtgtttttattttttccattgttttatgataaatgtgggagagaaatacatataaaaggggaattaaatatggggcctacgcaagagacttatacaattgtacgttatcaatctggtacattttcaaaacaacttgatgagattgttacagaatctcctattactattaaattgaatggtgaagaatatgtaacagtcgtatgcacaccaaattatattgaagatatggtaattggttttttaatttctgaggggattatttcttcctataaagatgttgaagaactatgggttcaaaaagataacggaattgtccatgtaaaatcatcaaaagtgaatccgctctatcaaactttatataataaacgatacatcacttcttgctgcggaaaaggtagacaaggttttattttcgtaaacgacgcagcaaaagcaaaagacttacatgatatacatgtaaaaattactcctgaagaatgctttcatttaatgaataccttgcaacaatcttctactacatttcgccaaactggcggtgttcacaataccgcgctatgtgatcgaaacaatatcctcctatcaagaatggatattggaagacataatgcattagataaaatatatggtcattgtttgcgtaacgatatatccattaaaggaaaaatcatcgcatttagcggacgtatttcatccgaaattttactcaaagtttcaaaaatcggatgtgaaattgttctatctaaatccgctccaacaaaactggcattgcaacttgcccatgatttaggcattacagtcgtagggtttattagaaatgaatcttgtaatatttacacacatccaaaacgaattgatggctatcaatccaatgtttaaaaaataactcctcaatcgaggagttattttagttataaaaatgtaacatattaaacacttgaatagttaacaaagttaatatataatttcattacataattaaaacaaaacattgtagcatatatcttttcattcttttacaaattaaaagagaatactaacaaaacatatactcaatcttataaaagtaatggatttatttgaaatccaccagggaggttacaactatggaaattcgcttattaacaacagaggacgcagaaatatatttaaaagtttgtatggaaggtttaacgaagaatccggaagcttttagctcttcttatgaagatgttcttaaacatgaaaatcctgtggctgctatggctaaacgattaagcaatccggataagtatactctaggtgtcttcaaagataatgatttaattggtatcgctactttagaaacaaaaccatttattaaacaagaacataaagcaaaaatcggttccgtttttgtttctccaaaagcgcgtggccttggagcaggacgagctctaattaaagcaattattgaaaatgccgataaattacatgtagaacaacttatgctcgatgttgtagttggtaacgatgcagcaaaaaaattatatgagtcattaggtttccaaacttacggcgtacaagagcgttcattaaaacataacggtcaatattgggacgaggaacatatggttctgttcttaaatgattaatacttcaatataaagtgaaactttactcagtgggtgatttttccatcctccactgagtattagctgaatcaatcgggcttttacgggcagttatcgcccacctaactccctcgcattcgctgaattttaagatgggagttactgcccacaaatagcggggtagttttccaaaaacatctttcttaataagaaagatgtttttttgcattacaacaatgtaatcttcatgtcacctttatcgatcgtaccaatccttaccatttattatactaaaaatataaagtgaaactttactcagtggggaactacatcccacgctgatcgcatgtacttgatatatagaggagaatgtgacatgaaacaaaacaaacgagctatgcttttaatatttactacagcaattgtaacttctgggttagcaattttaccttggtttatcatataggaatactcccctaacaatgaaaaaagctgattgcttcttaagaagcaatcagcttttttattttataaaatccctaaaattttatttacacaacttataataataaccatagatacggcaacacacatgacaaccgtattacgatcttgcttttctttttttgaaatttcttcttttggattcatgtgtatgatctccttttaaaaaaagtgtgagataggaaatttttcttatccgatgcgaggtgaatacgaaaaccctctctatctcacatacacaatagaatggaattgtcattttataaataaaatgacatgacgttatgtcgcaacatagggtattttgtgtcgctacgttttttattataaaaaatagttgtgcaaaactagtgcattttttatgtcaattactccgagcgaaaaaatcatccctccattcaatcacataaaaagagttttttattattttcatgtaaactatacaagtagaatgaacagtttggggtgcacaagattatggtaaaaattttattagtagacgatgaagaacgtatgttacgattattagatctattcttaagccctcgcggctatttttgtatgaaagctacctctggccttgaagcactaaaattaatcgaacaaaaagaattcgatattattttattagatgttatgatgccgaatatggatggatgggatacttgctatcaaattcgtcaaatttctaacgttcctatcattatgttaacagctcgcaaccaaaactacgatatggtgaaaggcctcacgatgggcgcagatgattatattacaaaaccatttgatgagcatgtattagtcgcacgaatcgaggctatattacgccgtacaaaaaaagatggctttgttagtttcaatggtattgagtgggataaaacgaaacataccgtcacagtgtacgatgaaaaaatctcgctaactcctatcgaattttcgttactcggactatttttgcaaaatacaaaccgtgcttatagccgagatgatttaatcgaaaaaatttggggctatgaaacagatatcgaatatagaacaattgattcacacattcgtaatatccgtgataaactacgcaaaaaaggatttccgattgaagattacctagaaacggtctataaagtcggatataaatggaaaagtgaataattacttcggtcagtgggaaatcgtataccactgactctttattatgaataaggtatggtgagaaaatgagtaaactttcccttaaaattgggacatactttttaatattagctttatgtattgaaacaattgctttcgtatctttttataaaagcctttcaacaatgcgtgtgaaagaagaaaccgatgctctattagagaaaggtaatcggtatcgtgataagattgtaaaccgtgcaagatggaatgatcattctaaacaacagcaatacacagaacgtcctaaacaccctcggtatcaggatttcactatcgagcatgcggctgaagatttaatcggttccgaattaattgctaatactgatatcacaatcattataactgacaataacggcaaaattatttctaactcagaacccataacgaaagaaatgcaaaaacaacttatttgtaaaacaaaatctattccaaaaagcgggttaattgtagaaagaaactggaaaaaatcaaaattcatctcaacagtaagtccacttgaaattcaaggatttcaaggtaatttacatatgttattaaaaacatctttcttagaaaagatgttacttaaactcctgcatcaatttcttatcattagtattttgacgattattttaacaactatttctgtctttgttttttctaaatttattacagatcctcttataaaaatgaagagagcgacagaaaaaatgtcaaaattaaacaagccaattcaattaggtattaaacgaaatgatgaactcggaagtttagcaaaaacaattgaagatttatcgagtgagcttacgtatatgaaaaaagagcgcaatgaatttctcgctagtgtcgctcatgaactattaactccattgacctatatgaaaggttatgcaaaggtagcaaagagagactctttaacaaaagaggagcgagaagaatacttacaaatcattgaggatgaaacggatagtgtaaccgatctcgtccaagatttatttatgcttgtacaattagaacaacaccaatttgttataaaaaaacaaaaagtgcttcttcagccatttttagaacgaatggttgaaaaaacaaaaacaacattaacgaataagcaaatgcaacttcatgtatattgcaaagatgatttagaagtttgtatagacgaaagacgtatggaacaagttatgttaaatttattacacaacgcttatcaacattcgccagaaaacacatccattacgatacgtgtactcatggaaacatattcttttacaataagtgtacaagatgaaggtgaaggtattcctgaagaagatatcccgcatatttttgaccgtttttatcgtgttgataaatccagaacacgagctacaggcggaaaaggcatcgggctagctgttgcaaaggaaattgtagaattgcataacggttctattctagtaacaagccaattagaagcgggaacaaactttataatcgagctaccttttgaataatatgcgtgtgaaaacaccagtagtagtaaacactactggtgttattttgttcataaaaacagctcatataagctaagcttttgaaattattcttatttcaatataaaataaaggtacatttgcaaagatttggagggtgatataattggatatccatgtattaacaaaagacgaagcagaaatttacttagaacttcgcgtagaaggattaaagcaaaaccctgaagcattcagctcttcttatgaagatattattaataaagagtgtgcgattgaatataaagcacaaaaattagcacaagatgaaaactatacgctaggtgcatttaaagatggaaaattaatcggggttgcaacgctggaaacgaaaccatatgtaaaacaagaacataaagctaaaatcggttctgtatatgtatctccaaaagcacgcggacttggagcaggaaaagcacttattaaagaatgtcttgaacttgctaaatctttagaagtagaacaagttatgcttgatgttgttgttggcaacgatggagcgaaaaaactttatgaatcattaggttttaaaacattcggtgtacaagaacgttcattaaaatataacggacaatattgggacgaagagcatatggtcttattcttagatgaaaataaataataaaaaacatcctcatgtttggaggatgttttttactttcttgtaaaccatgccgtgtgtaataattgaatcgctttcgcaatctcttcctctgataatatcgcaaacccaagtaaaactacactctcaggcgccgtaccgtctttatagtacgtagacacaggatatattttgatactatatttcgcagcttcttgaattaattcttcttcccgcattccattatgcacttttaataaaatgtgtaatcccgaatcttctcctatcactttaacacgattagagaaatacttctctatttcaaaaacaagtcgatctctcttctttcggtagacgacacgcattttatgaatatgtttttcccaatagccttcatttaaaaatcttctaatcacttcttggtccattcttgaaacactttgtgtgtaaaataaatattgctgttgatactttttaattaatttcttcggcaacaccatataactcatccgtagcgatggcaataatgctttagatagcgtccccatataaataactttcccctctgtatctaacccttgcagcgccggtataggctttccagaatagcgaaattcactatcataatcatcttcaataatatacctgctctcttctttctttgcccattgtaaaagctgcatccttctcgtaataggcataatcattccatatggaaactgatgggaaggtgtaacaaatacaacattcgcattgctattttctaaatctgcaatacaaattccatctctatctaaagataacatttggactcttgcttctccctgttcaaaaacaaccatctttctatgataccctgggttttcaactgcataattgcttccctttaacaattgaaacaatagtttcactaatatttgtgttcccgctcctaatacaatttgactagctgaacaacgcacacctctagattcatacaaataattcgtaatctcttctcttaagcttgcttccccttgagggtgtcctagaaagagaagttcgttattatgcggctgccatacttcatttacaattttccgatacatattaaatggaaaagcatttgtatcaattcctgtttgtgtaaagtcaaatttataacgcttctcctgaaacgggacttcttctatcctctcttcgctatcctctacatgaaccatttgctcaatcttgcatacaaaataaccttttctcgatatcgactcaatataaccttctgcaagtaattgttcgtacgctgcctctactgtatttttacttacttgtaaatgtatcgctaactttcgcttagccggtaatttcgtaaaagggacaattgatccatctttaatctctttttttatatactcatacaattgcacatataatgcctttttactattcatatttaaattaggcgttaattctaacatagtatctgaccccttaataaaactaaaatctgatactttttacagtaccagattatatatataattccttttatcatgtcacacatcaaaaatcaaatactggagaggagaaacatgataatgaacaacggtagacgtatcggacttattatgattattacaggggctacattatggggattatctggtccaatgattcagtggctatttcagcatactaatgtatcctcaattgattttttaacaattcgattgttgcttgcaggaatatttattttgtctttcttacttataaagaaacaaaacatatttcaaatttggaaacaccttagatattctatacaacttattattttttctattctcggcatgctcggtgcacaatacgcctttatcgaaacggttcatattagtaacgcggtcactgcaacgctatttcaatttctaggtcctgttcttattaccgtgtatgttgcatttgaacaaagaaaattccctgcttccatgcaactattcgcaattatagccgcgctaataggaacatactttattattacaaatggctcaattgaaaatattgttttatctaaagaagctattatttttggactattaacagcaatcggatttgcattttatacccttcatccggcttctctcattaaagaatgcgggacaactgtagtaattggttggggaatgttaatcggaggaattgcactacttatttataatcgttcattcgggtggaatcaattttcacaaacccttacactgaaaactttttctatgcttattcttatcattgttagtggtaccctttctttccttctatatatcggtagtcttaaatatttagcagcaacagaaacaagcattttatctagcattgaaccccttgtagctgccatcgtttcaatcacttggctaaatgaagcttttggagcataccaattattaggcggcgtatgtatcgttctgtccgttatttttttgacgatgcctcaaaaagaaaccgaaccaacctatacaacggaacaaatataaaatgaaactttaattagtggggctatctcccactgattattaacctacaccaatcgggctttacgggataaaaaatgtcaaaagaggtcgtacaaaacttacgacctctttttatactttaaaggaattgtcccgccttctagcaaatacaattacactaacaataaaaactaggagtgtggcaccatgaaaaaaatcggaactatgctacttctctccctcctcatcactggatgcacacaaactcaaccggattcaaaagaacaaaaaaaagacgtaatagcaacttcatccactcaagtgaacgcaccttccttctttcaccttagtgttttaaaagatgtaaattgggaagaagccccctcattcatagacggaaaaatacctttaaaaggcatcgaaggaaaaatcgcaatggctgatagtcctattatcgcaaatgaacaaaatgaaataatgtggtactttctagattctgaaatacctactggaaaattgtctattattgcgctaaaacaaggatctgtaactccaacaccagtactctttcaaaaagaaatttccaaacaaacttggactacttcaaatacaatcaattctactacaagcgaactccctctcgctatgtcactaccttcatctggattatggttattaaatatctatgtgaatgaaaaatattatgatcagtttgtaatcaccgctaagtaaagtgacaaaaataaaccactttcttacaacaatgtaatttctacgtcatgtacttcgatagttgaattatctctcttctcttatacttaaagtaagaaatgaagcgaggagagatgagagatgaaaaaaatgatagaagtaatcgtagcagtaactgaggttttagtgaatggtaaacaagttgcaatggaattaaataaatagtgaagaaacataaataattctacacttcttcattattttgatttcttatctcaaaaaagcagtgccttttaggcactgcttttagctattaataacgtggtattttcgtaatttgtgccacgcctgaatcaatagctgctttcgctactgcttccgcaacacttggaacaactcttttatctaatggattcgggattacataattcgcattacgttcttcatcagtaatgatgttagcgatcccatatgctgccgctaatttcatctcttctgtaatatcagttgcgcgcacatctaacgcaccgcggaatattccgggaaacgccaatacattatttacttgattcgcataatccgagcgcccagttcctactacagctgccccagcctctaatgcatcctcagggaagatttctggaattggattcgccattgcaaacacaattgctttctcattcatcgtctgtacaagttctttcgttaatacgttaggagcagatacgccaataaaaatatcagcttggttaatcgcttcttttaacgttccacgcacatgttcacgatttgtcttttttgaaacttcaatttgcgcttcgttcatccatgtttcaccttcacaaacaataccttctaggctaactagcgtaatgtgctttgcaccagcctttaataataattttccaattgcaattcctgccgaacccgcaccgttaataacgattttcacattatccatttgtttgctaacaacttttaatgcattaataacagctgctaaaacgacaatagctgttccatgttgatcatcatggaatacaggaatattcgtttcttcttttaatcgtttttcaatttcaaaacaacgcggtgctgcaatatcttctaaattaatccctgcaaatgtaggctctaaatttttcacaagggtaacgatttcatctacatccgttgtgcctaaacataatgggaaagcatctacattcgcaaacttcttaaacaaaatacttttcccttccataacaggcatagccgctttcggtccaatgtttcctaaaccgagtaccgctgttccatctgagacaactgccaccatattaccacgtgctgtatagtcatacaccgtttcttcatctgccgcaattgctttacaagactccgctacacctggtgtatacgtcaggcttaaatcatccgctgaatttacttctactttacttgtaatttcaatttttcctactaattctttatgcaataacaatgatctttcattaatttgatttgctaacatacttataatctccccttaatttgacaagctagctatatgaatatagctagcttgtttgatcatgaaaacatctttaataatattgtcgctgttacaaccattgccgctccgcctaaacgagtcgaaatttgcgcgaacggcattaattccatacgatttgaagctgataaaatagcaacatctccagttccacctaaaccgctatgacatccagttacaatcgctgattcaactggatacattttcatcactttccctacaagaaaacctgatgctaccattgtaagaacaaccgatgcgcacacaacaacatatcctactgaaagaactgctgctacgtcttttaacggaatatatagcaatcctaatccaaccattaaaggccaagttaaattcttcgaaataaatttatataaatggaatgctccttgctccatttttgctggcattaatttaaagtatttcacaagcgctgctgagaaaatcataatgattgccccaggaataccgatgaacttagaagcaaatcctccgaagatgaagaacgtacacgcaattaataaacctgctcccattaatgagaagtcaattggcttctctgtattttgttcttttaataattctgcttgattgtctgttttcactaatacaccgttaccactaagctccggtttcttctcacctaaacgcttcatataccctgcacttacaattgcgaacatatttccaataatagctgctggaataagctgtgatacaaacgttgctgatgattcatttaaaatatcactataagctagcgacaatggtaaaatcccttccccgataccaccactcacaattggtatgatgataaagaagaatgtgtgcttcatttcaaatccaaataatgaaccgaccaataatcctactgctacagaagctaacgtccctactactaaaggaataaacatacgaacgaaaccttgtactaacactttacggttcattcctaaaatacttccgactactaaacaagaaatatataaatataaaaagttcgattttttcattaacatagtcgcagcttccattgaagctggattcatccagttaaaaaatacaagtaatgatggaataaataacgaaagtattgctggaccaccgatattttttaaaattggaattctcatcccaatatcgcctaagaaaatccccatgatcataataactgcaaatccaccaatcatatctgctggcaatttattatatacagatgccccataaataatagcagccaatactacatataacggtaaaggtataacaccgatttttacattcataattttagaagcgaaagattctctttgtacttcatttccttcagaaaatgataccgcttccacattcttttgaattcccatatggcaccccctcgttttcttaataacaatattaaaacgctttcaatagtaaaaatagtttttgtaagttttgtaattgattttgtaattaaaaaaagtataagcgacttatgttaagtcgcttatacgtaaaactctattttcttttgatcaacacatcttaatttacttacaggtcttcccacatgttggtacatcatttcgttttctaacaccccaatgtcagtcagaaacattacatattttcgaatagaaactcttgaaattccaactaattgtgccatttcatctgttgtaaatactcttccattcagagactcgatcttctgccaaattaattgcaacgtttgcttcgttaacccttttggaagctctttcgtcacagtaggctctcttttttctttttgtaaaattaatgaatctaattccgattgactaattttttgttgttctttcatgaaagtaagtttttctcgatatatagttaatgcctttttaaatcgttcaaatgtaaatggtttaattaaataatctactacgccatattgtaatgctttttttatacttcccatatcatgtacagctgaaatcattataatatcgctttctttttcttggttccggatatacattaaaagctcaaaaccagtctcttcaggcataaaaatatcaagtaatactaaatctactcgtgatttctctaatatttctatcgctgactttactgagttaactgcttgaacaagttcaaatcctcctacttgctctaaataatgcgtatttaacattgctaccatcgggtcatcttctacaattaaaactttaatcatatttgcctctcatccctacctttaggtatttcaatcgttatcgttgttccctttcctactaatgaatgcatatgaatttccccatttattcgctgtatactttcttttacaagatacaaaccataaccgcggttatctccctttgtggaataacctttcgtaaataattcctctatttctttttcttgtataccttttcctgtatcttgcactgtaatagttagtatatccccatgttgtatcttaacttcaactcgcttcttttcacaattcgtaactgcctctaatgcattatcaattaaatttccgacaatcgtaataagttcatgagtaatactttcaacatctatttccggcatgtaagaatcttcacttataattaattttatatttttctctctagcatagctgagcttacctagtaaaaaaccagcaaatactggactttttattcttttcataactccaccaatttcatattgatgctctgataccatgccgcttatatacttctgtaattcttcatactgtttcatatgtgtaagccctaatacgacatgcatcttattcataaactcatgagattgtgcccgtaatgcttctgcatatagtctaataccagttagttcctctgctagttttctaatctctgttttatcacgaaatgttgcaattgcaccaactatttctccttttacatataaaggaactcgatttgtcacaatcgtaattccataaatattttgttcttcgtttaattgtacttctcccgtttgcaatacttcttttatacgtgaatttggcatatacaactcaacatctttaccgataaaatcttcttcaagtccgctttttttaaatagacgtttcgcttcattattaattaacgttactctagcctctttatctacagcaataataccttcctttacagattgtagcatcgtatttctttcttcaagaatttttgctatcctgtgcggctcaagaccgaataaacttttctttatatgtctagctagcaatattgctcctataattccgactaatacacccactccgacaccaatataaataatatgtctactttccttaactctctcttttacattatctgctgaaataccaacagccactgctccaagttgttcacctgtttcagaaaatattggtacaaacactcgcatggaaatacctaaagttccttctgctaacgatacatgttcttttcctttcaatgcaggcccttcatctcccccaataaaatgatgccctattttttgaggatttggatgtgactttcttattccattcatgtccataactacaataaattgaacacctgtgttttgtaatattctatttgtatacgtttggattgcagaggtatctgctttcccaaccaaaccatcgattacaatcgaatcattcgccacaatgtgtgcaattgtttttgctttctctgcttggctatcctccgtcgtccgttctacattatgactaattaatatatctgtcacaagtaaagaaaaaattacaactgtacaaactaacaatgtaatcgttttccataaattccatagtctttttctttttttcatcctgttaatgactcccctaattgctgaatagaaaaataagtaaggtgatattattttcaccttacttatctgctgttattatactttaaatttactagtcatcgcttgtagttcttctgccatctcagctaagttttgcgaagctgaactaatttcctccatggaattaacctgttcttctgttgaagctgcaacactttgcatactagctgtattttcttctgcagcagctgcaatttcatcaatagcatttgtcacttcatttgcatctccagcaattctcttcgttgtttctaccatttgattaacttgagaaacaatatgtgtagtagaacttaaaatttccgtaaaacttactttcgtttttgttacaacatcaaggccttgttgaacttctccattcacattatccatcgccttaacagtatgttcaatatccgccttaatttctgcaattaaatttgcaatctctccagatgactctcctgattgctctgctaattttctaacctcatctgctacaatagcaaatcctcgtccctgttcacctgctcttgctgcttcaatagccgcatttaaagctaataagtttgtttgagttgcaatgttttgaattgcttcagaaatagctcctacttgctttgatttctcatcaagaagtttaataatagcatctgactcggataccgacctagaaatagactgcatttgttttgcggtttgttcaactaaatcttctccctcttcagctctttcacgggcatgtaatgaggaaatagaaattgactctgcgcttccagttacatcttgaattgctgtatttacttgttgtaatgtagccgcaccttcttcaacaccttgactttgtgactcagccccacctgatacttgttccatcgcaattgtaatttgatctgtcgcatcatttgcttgctgtacgctcgctgttaactcttcagccgatgctgcaacatgttctgctgaaaagctaatttgggtaataacatcttgtaaagacatagacatttcattaaatgaattccctaatttccctatgtcatccttggaatggattgtaattttctctgttaaatctcccttactaattttatatgccgattcagctatttttcgtaatggccctgtaatagactttgtaatgaaataaattaatatactaccaaatgcaatagcaatagcaatgacaatcaaagtcttataaaacactggattggcagcttggttaatttcttcatcgaacataacaccaactactttccagcctgttttctcatttgttgcaaagattaaattctttttatcatcttgttctgtataagacacatttccttgtttttcttcataaattggtttaatccaaggatcagtaacttttgcacctggttttctagatggatgactaacaatttgcttattttgatctaaaataactgcataacctttttcaccaatattaatcattttggaaatttttaagatgttatctaaatttaagttaattcctataacacctttaccatcttttacttctttagcaattgtcactaccatatttttggtagatgctgattgatatggtgaagtaacaattactttccctttattttcatgtgcttctttataccaagatctatctcttggattgtatccatcagccatttggataaatggttctcttataaactttcccgtctctgttccaatataaataccttctacttctggatgaagttttatatattgcgctagcttcgttcttactatttcttcctgtccatttagatatgtatcttctgttaagatgtctgcaaagtacgtcgcatcaacaaatttctcttctatattttgagaaataacagtatttaaaatcgaaatattctcctttgctttagctgtcatttgatgttcaaaatttgttttggcagtttgatatgaaacaccaccaataataattcctggtatagttaaaataataaagaatgaaatgattaattttttattgatactcatacatttaacccagttaaatattttttgcataataagcctcctttatgtaatgtggatacttgtgtcattttatacaattaacatgcataaaacaatatataatgataacatgtgaatttttcgtcaattatgcatttttgcatatccactccttatacgtattttaatcataaaaataagagaactttagcattatatatgctaaagttctcttatttcttaacagcttctactctataaaacttctcttataatccttaaatctttacccttcgccttatagtcatattactaaaactcttcgtcctaatttatttgacgctctttacataactaattgcctgacttcccatttgtacccatgcctgttcaaaggtttctctcggtacttttacatctaagctatcctcaagtggatctcgaatatatacaaattcctgatcatatccaataagtacaacacaatgttcattatacgtaatagaaacatctccactatttgtttcccatgtagtaaattcagctgcatctaatggtgcaaatgttgcatttgtgatcatgactacaggttgccctgcttttatcctcttataaatttcttctatattcttccctgttaagtctacagctttattaggtaaatatttttccgctaactgaaaaagtggcccatgatatacaccatatcccgattcagaaaatgtataaatattacctacaaatccttcatttggattcccgcgcacaccatcgtctataaaatcaactttttttatttcatttgctaatgtcatcttatccactgaaacaccagcgtattgtaacatcatcgctaagcttgtcacttcacagcctctatctagctctggtagttgctgaattaatggtacacttgataaaatgaccttttcatcattattactaaattccggttctttcccgttttgtatattgaagaatgtccacttctccccatactttgtaattccatttgtatatacactccataccgctatagctagtaatgctatacatatataccacttaaacctccgtatcactctcacgccctttttagttcgttaaataagaataaaatgcgtcagcatccgttcgaatcactggtacaaaatttagttctttttctctctcaggttgatctttttttattttttctgttagctcttgaatattcatgttcgctttatccatattaagctcatctgccaattgtagcaccttttgttcattaatttctcttaatacttgatatatatctttcccatataaatcaatatgatatttttttgcttcttcctgcactttttgttcgtacacctcttgtgctaacacttctatctcttttccttttggtgaaatacctaacttccctgcttcctctcttaccttcgttccatagatttcttctgcaatgtcctctatttcttttccatttgtcgaaatacctaatttatccgcttcatcattaattttaatcgtattaatttgattaattaaatttacaattgatgtattttctatagatatgcctagttttaacgcttcttgctttacttttgtttcatagatttcttctgacagcgtcccaacatcttttccttcaatcgaaattcctagctgcttcgcttctcttcctacttctgtctcatgaatttctttttctaacgtaatttgttctttcccttccgtttcaatacctagattctctgccttttcttctgtatgcacagcatgtatctttccattatttaattgttctttactacgttgtgtgtaatctgtctttccttttgatgtttcagaaggagaggcaccccctaatatacttaagctcattactccaatagtgaataccgtcatcattttctttttcaaaattaattcctccctcttatactttctttcccatcattcccctagtttttttaatactatacatacatctcatcgctgcttgagataacattatgattgataaaccccactcacatacacctagtctcttcttcatgtaacgaactttcttcatgccatatataatataaatagtttcttaactttgtcttaaaaaaagacgaccttgtaaaaacaagatcgtcttcttacttatattttttggtttttagggaaaatcacttcaaaacaagtgccatctccccatttgctctctactgatatttttccgtaatgcttttctacaatccaatttgcgattgaaagacctaatccagctccttctgacgtacttcttgctctatccccttgataaaaacgatcaaataatttcggaatatcttcttctttcactcctatcccgtcatctttcacctgtatgcgaatcgaactactcgtctgcgtgcaatcaatttgaatatgcccgccttcgtttgtatacttcatcgcattatctaacagtatgaccatcatttgatgaatccgctctctatcagccataaaagatacgtcacgttctacttttagtatcatttctttttcttgataagaagcaatctctttatatggagctactatttcttctaacaatttatcaagttcaaatgtttttttatccatctcaatttgattagaatcagaacgtgctagtaataataaattactaacgagttttgataaccgcctacattcttttgaaattgtagaaatatccatcgctttttcttctatcgtagcggatggtgactgaaataacacatccgtttttgattgaataactgcaagcggtgtccttagttcatgtgatgcatcagaaacgaattgctgctgtttctcccatgaattttgaataggtacgagtgctctgccagctaggaaaaagccgatacctatcgcacataaacttcctatgctacaacctataacgaggattaaaaataaagtatttaacattccttcttccgctgttatatctcgcacgatttgaactatttctccatctttttgaagcgaaaatgctctaaaatatcgtccttgtactttgatatcttgtaactcccctattttttccggagaaaacttttccaaattctcttcaaaaattgaacggaatttacgattatcgccctctattttcactattttcccattccaagttattctagttactcgcggatctccaatttggatattctccatacgttttcttggtggtattttaacatctaatttttctctatactgagccatcatttttatagattgatccacttcattataaatacgcttatatgtgtatgaataaataatactacctaatatacctattaataggataaatactaatgaattcactatagtcaaacgaatgcgtgtcttttgaaacatacttccctttttcattgttcttttaatatatatccaatacctcgaacagtttgaatatctttctgataaccgaatggttctaattttttacgcaaatgatgcacatacacttccacaatggctactgtcgtatctgaatcaaatccccaaacacgatcaaaaatttgttcacgcattaaaatcttcccgctattttgaatgagatactctagtagctcatattgtttcaatgtcaacttaatactttgtccatctacttgaacgtctttatcttttccgaacaattcaatccctttataacgaatcgtttgctgcgttgttaaactaccacttctgcgtagtaaagcgcgaattctcgcttttaattcaggggcctgaaatggcttaacgatatagtcatctccaccaaaatccaatcccttcacccgatcttctaaagaatctctcgctgtcaaaaacaggactggtgtttcaatcttttcatcacgtattttttgaattacttcaaatccatccatccctggcatcatcacatccagcaaaattgcatcatatatattttgaagcgctaaaaacaatccatcttctccatttattgccgtatctacttcaaattcatcacgcaaaatttgtacgatagactctaataacgaggcattatcttctactacaagtaagcgcatgctctcaccttccatcaaatagttcaattctatttattattacatttcttctcttcataacaaaagaatgtagttacattacgtattttcatttttaactatttccttctaaaattttgaagttttattataaaaactttgtcttaaatttagcttaataaaaaattgaaagaaataagattcctcttatctctttcaattttttattacatatacctttttactcggcaattccaaacaatttagctgaccaccgtacacagccccgccatcaattccaataatacgattactaccaaaatacactccgcactcctcactaccatgaagcgtttttgtttccgtatgcccaaatacaacaaccttttcaccgctatatccattatgaaattcattacggatccacattaacgtatatggttcagattcagaaactcgtttcatcggttcaaccccagcatgtacaaatatatactcttctgtttcaatgtaatgatctaattcttgaataaactttatatgttcctctaatacacgggagtgtaaaatcggtttttggaagtctttctcattaaccgcaatatcttcttctacaaatccatagctatataatgtcttatctccaccatttctttttacccaatggttccatgaatgttcctcatttgtcgttaacgccttaatcatcatatcttcatgatttccctttaaaatgagtgctccctcttctttcaattctcttaccttttcaattacagcacgcgcatttggaccacgatctacataatctcccagtaagattaattgatcctgtttcgcatcatattgagcttcttccaataactgttcaaacttttttatctctccatgaatatcactaataacaagaattcttttcatattatcccccctctttctaattatagttcaaaacggcagaaatttctgaactcaaatctaaaatcacatttattacaaataaaatgattatccttacaacgatgtaagtctcttgtcatccaattcgatagttgtaattactgtatttccttatactgaaagtaagaaatgaaacaaaaaacaaggagagatgagagatgaaaaaagtaatggaagttgtagtagcggtagtagaggttttcgtaaatggtaaacaagtcacaatggagttaaataaataatgaaaaggacaacatttactctagaccctttactcatataaaagagataagacttcatcatttctttgatcccttatctccctataaagaaagccgtatcccttttaaggatacggctttctcttatttttgactcgtacgagctgaaatgctaattgctctatctgttgctttggcagcttcatctaacgcttctttactattcttcccgtcatacatcgcttctaatgcttttacaactgcatctcttgattctgggaatacactaattaaagcaccttgtgttgctggagattgcttcgttgcttgcagttgatctactgttactttcaactgtgggtatttttcatattgctcttttactaatggctcattatatgcatctggattaattgagaaatagcctgttgcagtatgccattttgcttgtacgtctggcttcgttaaatatttcataaagtcccaagcaccttgttgcgtttcttctgaaaccatattcgtcatccataatgatgctccaccaataacaacaccattttgtttcgaatcctctggatacggaatatatgaaacacctacattaaacttagatgcatcaattaaatcacgaacacctgctgaagaatctaaatacatagcaacttgtccagactggaacgcggcacgaatatcatcccaacttgctccatactttccaagtgcgccagctttatttaaatcatctaacattccaaatactttctgtccttctttaccgttaaataccgccttttttgcagcatccttacggccgttttcgttatctacatataaagcaccttgtgtcgctaacaattcttcaaagaaccaaccgtagttaagcatggagaatccatattgttttacatttccgccttctttaatcgttaactttttcgctgcttcttgtaattccgcatatgttttcggagctttctctggatctaagcccgcctttgcgaaagcatctttattataaattaatactggtgtagatgaattaaatggcatagaatacatttttccatcaactgaataataatttgtaattgctttttctaattttgacgtatcgtacttatctttttttatccagctatcaattggtgtgatttttttactatcaatcatatatttcgttgtaatttcactcgattgaactagagctggcgcttctttcgttgcagacatcgttctaaatttcgttaaagactcttcatatgttccttggaactctgcctttatctcatatttattttgtgacttattatagtctgcaacaagaccatctagtactccttgtgtttttccacccatcgcatgccagaagcgaattacagttttatcaccatttttttcaactggtgctacttttgcctgtgcttcaggttttccttctgttttactatttgaacaagcggcactagataatgccattgttgctgccattaatagagcagcaccttttttaactagactcatttaaatctcaccttctcttagttatttaattgcaccttttgttaatccttgttgtaattgcttttgccctaaaaatagtaaaatcaatgttggaataacgataaccgtaacaccggccattacgcttccccaatcagttgcaacttcttgagactgaagctgcttcacaccgatttgcactgttcttactttttcatcagtggtcactaaaagtggccataaatacatattccatgttgttaaaaagctatatactccaagcgtaataaaactcgttttacaatacggaattacaacgctgaatagaaatcttatatttccaatcccttcaataaacgcagcttcttttagttcattcggaagtgtcataaaatgttgacgtaacaagaaaataccgaaagctgttgcaaaaaacggcactgtcatcccggcgaaactattgatccagccaaagttttgaatcgttaaaaagttaggcaccatcgttgcttcccacggaatcagcatcgttgaaataaacaggaagaaaattaagtttctccctttaaactgaagaaaaacaaaagcataagctgctaaacttgatacgataagttgtccaatcataacgactgtcgatacaattaaactgttatataagtatgtaaaaagtggtactttttgaaaaatattaatgaaattatcaaaagtaaactgggtcggaaataaccttctcatttgaatatcgtctggtgtcataaaacttattaaaaatgcatacagtacaggaaaaaataccattactgcactaataatgagcagcatgtataataggaaattttgtttccactgtttaacaatcatttataatgcacctttctctcagcaaacttaaattgaagtaatgtagcaagaaaaatgaaaacaaataataccattgcttgtgcacttgctgttccaaattgatgattcacaaacgcctctttgtaaatcgagtacacaatcaaattcgttgcatcatttggtccaccgtgcgttaaaatatcaatttgtccaaagctttggaacgcactaattaatgttactgttacaataaagaataaagttggtgatagcatcggtaatgtaacacggcgaagtttatataaataactagcaccatctatagatgcactctcatataacgacgtatcaatattttgtaaaccacctaatataactaaaaatgcaaaacctgtattcacccaaactgttgtaactgatacagagaatagtgcccagtccggactcgttaaccatgcgattgcaggaaggttcatagaggctaatatattattaaataatcctacacttggatgaaataaaaatagccaaatcactgcactagcagctactgatattcccatcgtcgaagaaaacagaactcggaataacccaatacctcttacttttccatttgcaatcaatgcaagaaacaaagcaaatataatactcgtaggcactgtatataaaacaaataataaagttgattttatacttttgtagaaggctggatcagagaataagtattgataattttctaagccaacgaaaagattagcttccccatgtatatcggttaaataaaagctatagtaaattgtcctaaacaatggatagaacaaaaaaatcgaaaataacaaaatagatggcgccaaaaacaataatcctattcttaaatctttcgttctcccccataattttttcttttttgacacctttgtttgaactggtaacttacttacttcgatcattatttcgccaccactttcaactcttcttcagctaccacttttaagcgttcattcgtgttttcattaaagaagcataacttttcttgcgagaataataattttactttgtcacctttgttcaagagtaactgtccgatgactttcgcactccaagttgttccatttaccgcaaagttcaatatagattcattccctaatacttctacagattgcaacgtcacttcttgtccctcctcagacagtgcaatatgctcaggacgcatgcctatgcgaattgttccttctggtaattgctttaactgtctaatagataatggaatttgcaattgccctatatgtaatacacctttttctttatttacttccccatcatttatattcatagaaggagaacctataaagcttgcaacaaattcgtttgctggttcgttatatatgtcaagtggtgttccaacttgctgtatacttcctttatttaaaaccatgatacgatctcccatagtcatcgcttctatttgatcgtgggtaacgtaaatcatcgtaattcctaatcgctgctgaatttctctaatttcaattctcatttgcgcacgtaatttcgcatccaaattcgaaagtggttcatccattaaacagattggtgcttgactcacaattgccctggcaagtgcaacacgctgtctttgtccgcctgataattggcctggtttcattttcacatactctttcagtcctaccatttcaatggcttccattaatcgcttttgtcgctcttctttttgtacttttcttaccttaagtccaaataaaatattttcttctacagataagtgtggatataatgcataattttgaaataccattgatagattacggtctttcggctctagatcatttgcaacacgttcattaataattaaatctcctgaagaaatctcttctaagccagcgatcattcgtaataatgtgcttttcccgcatcccgaaggtccaactaaaacaaaaaattcacccttcttaatatgaaccgatacgcctttaaccgctgtctcttctgcatttttatatacctttgaaacatttttcaattcaatcacaaggttgcactccttttttcttcttgtatccatacttcataatgacttgttgaaatcgcacttgctcctgcatgaattgcaatttccgcatcttctcgcgtttgaatcagcccacctgcaataataggaaactctatttcctctactagctgtttaattatagaaggcataatccccggcataatctctactgcatttggtttagtcgttttacaattttcaattgatttagtaagggataaagtatctacaataaaaatacgttgaattgttttcaatccaattttattagcatttcgaattgttgaaccctttgttgaaataataccttgtgccccgataacatcttgaatatacaaaagcgcttcctctgtattcgtatttaagccttgtataaaatcacaatgaagaaatacatcatgtccatgtttctgcaattcatatacacgctctggtaattccagcattgaaccagtcataagaaaaacttttttcggcaattttttgtatgctttgtatcctttccaatcctttatcatcgcaatataaggttctttaaacatttttccacctaactgttctatttttatccaaactaaaaacacctacttacatagaacgcctttctccttatttgaactctagggaatagagcacacctaagaaagtggcacattatatgtaagtgggtgttctcaaatgttctctaccctatttattttgttacctttactatattacgcatttattaagtcagttttgatagattgttaattaggtgttaatcaaatgttaatattcaccatattttcttaatattaatctagatatacaaataaatcccaacggcaaacaactatctttaaaatttaagtgatatgtaaattcattccatagttaataagttttagttttctcgcaacggcttgtgaagcataattattccaagaagtactataaagtggaatgcttttttcttcttttattgatatcgcccaggctgtaacaccatcagtaccatatccgttcccttgaaactccgctaaagtttccacacttgcctcagcagctacgggcgtacttctggcactgcaacaaacagaaactaccttttcattttttacaattgccaaataaggttgcctccttatttactccatttaccatccattcataatctatttttcatattcaaaataaaaatcccattcaaatacacattactgaatccatcatactaactgatttcttcattctgtctatctaaatgggattatttttcgttttttactctactggctgttgtggctgtactacttcattcgctccagctaccctcaacatatttacaatatctttaaaacctcttttttcagcgtattgcagtggcgtcagatgttccttgttagccatgtttacatctgcaccgtgatcaataagcaattgaattactttcttatggttttcactaccatttcctaatacaattgcttctaataacgctgttccaccacgttcatttgtataattcacatcaatatctgtatgctctaataattctttaacaacctctacatggccacgctcagatgcagaaataagtgctgtcccacctgacctagtcgtttctttcgtattaactcctgcattaattaatacttttacaatatccgtatatccttctctacttgcataaagaagtggattactttttttctcatctttaatttcaatattagcacctgcaccaattaatgctttaactgtctctacatgattttggtacgtcgctgcaaggacaggcgtttctccgttgtcaccttctacgtttatattcgctccatcctgaatcaacttcatagctgtctctgtatctccaagggtagctgaaagtaacaactgtttgtccattaaatttatacttttctcttctttagattcttcctgttctttatgcttctcttttttcttttcatttttcacatgaaccggtttcgattctggttcttcttgcttatcgcaagccactaccgtcattaaaagtcctaataaaatacataataaaattttttgttttctcacaactacagctcctatgaaagataatgttttcttaaccattcctccatcacatacaataactcttcttgagtacatttatccataagccctttatattccttctttaatcggattatcttaagcttatactatgtttctcaacctattgaaatgatacgcctgatggccccatcattaacattatgaagcaattagtttagcacgtttttaccgcatttgtatacatttctaaaaagtacataaagtgaaactttaattagtgggggttttgttcatccaccactaattattagcccacaccaatcgggcttttacgggcagcccgactccacctaacttctttgctttcactaaattttgaggtggggatcttattgcccgttaatgcgggataaatgattgctttaggttactatattccattgtaaccgttcttctaaaaattttacaccttttctatatttgcacctgattaataatagaaaaagacaactatatagttgtctttttctattattaatgatgtccaccatgatttcctgctttcggtttccccatcatctctttattcatttcccatttatgctctgctagctctttatatgaaagaactttccccttatagttagatacaaagctctctgcatcttttttatttttaaatgaaatgacattataagccatcggtgtcgttattgttttatcatatacgtaagtagcgtcttctaacgaaatccaatctttcgaatcataatctcgaacaaatttctctttcgtcttttcacctgagttgatctccatccatttatacatacaaccgatatcatcaaactttaacgcttttccattttctaaaataatttctgttgcaaattgattatctgttaccccaatttgacaaatatcacatttatcatgtttctcatcaatggcaacagctgctgtttcctttttcccacacccgactaccgtaaatacgaaacataaacatatagcaagtacgacatattttactttcatcaatattcctccctagaaaccgtatactccacgaaaagaataccaaaaggttgtgtgagatttgtgaaaaaacaatgtgctttttgtaatataggaaacaaaaaaagatgtgtagttatttctacacatctctcatcactcacaacctgtaattaataaatcatcttctaatttaactaataatgtatcctcactaatttcctgtccaacttctacatttaccaatcttatatttccactaatcccgactgcaatttttttaagctcaccgtcattttttcggatcatcagtaatttctcccattcatatacgtaagaagattcattaataaaaatctcctctacttttccttcataagagctataaatctcttcaattctcgttttcatataacatctactccctatttcacacttcactattttcatcttattctaccattcttacgaggagcagcttactttttaaaaattcaaattaactaccatgaacaaaatgaacaaaataaaaattatgcttctaatgatgttatttttcaaattatttaccatttgaatagatgcttttattataaataaaaaacctttttctgaatttttattctattttgaaagcgcaatcattcttttgagggggaaattacatgttagcactacttggatttgcgatggtatttgtctttatgtttttaattatgacgaaacgtatgtcagcgctagtagcattaatattaattccgagtgtttttgcattaattggcggattctatgccaatatggggcctatgatgttagagggaattcaaaaattagcacctactggtattatgcttatgttcgctattttatattttgggattatgattgatagcggtttattcgatcctgtcattagtaagattttaaaatttgtaaaaggagatcctttaaaaatcgttgtcggaacagctatattgactattatcgtttctctagatggtgacggtacaacaacatacatgattacagtttccgcaatgtatccactatataagcgccttggaatgaaccccctcatattagctggagttgttatgttaggggcgggggtaacaaatcttacaccttggggtggacccacagctcgtgttatgagcgcacttggacttgaggcttctgaattatttacacctcttattccaggaatgattgctggtgcaatttgggttgttttcgttgcttactatcttggaaaaaaagaaagaaaacgtttaggaattatggatgtacagtatttaaaacaaatgcaaacaatggatgagcaagctgcaactgtcgaagccgcagtgcataaacgtcctaaacttctatggattaactttttattaaccgctacattacttgtctgtctcatactagaagttatgccgttacctgttttatttacagtcgcttttgctattgctgttatgattaactatccaaacttagaacaacagaaagaacgtattgcttctcatgcagggaatgtattagcagttgtttctctcgtatttgctgccggtattttcactggtattttatctggaacaaaaatggtagatgcaatggctaacagtgtagtaactcttataccagatgcacttggaccacaattgccaattattacagctcttctcagtatgccattcacatttttcatgtccaatgatgcattttactttggggtattacctattttaactaaggctgctgctacttacggaattagtgcagctgaaatgggacgtgcttccttacttgggcaacccgttcacttattaagtcctcttgtcgcttccacttatttattagttgggatggcaaaagttgattttggtgaacatcaacgttttactttattgtgggcagttggaacgacaatggtgatgttgattactggcattgtaattgggattattccaatataagacgcaaaaaacagtagaagaaataaatcctctactgttttttattatgaagaaacaagaaaataccgtctctccggtctccccacactcccatatattagctctgcgtggactttcttcccagatattaaatactctaaatagcgccttgcagttgatcggcttacgcctaccattgaacttagtacctctgctgtaatcccttcttcattaactgttaacatatgcttttttattttcgctaaagttaaaggatctatccctttcggggcatattccatttcatttcccttcacgcctctttgagaccataaatattcaatttgttccgtagataattgattgtttttctttaactgtataatctttttttgatagccttccagacttgctttaaatcggtcaaacattagtggctttacgatataatctgttactccgccccgcagggcgtgcctcactacatctgcttccgatgctgctgtaatcataataatatctgtatcgtgcaaatgattcctaatatatgtgacaagttccgttccttgcatatcaggtaagtacacatctaataaaacaagctgtggcttcacaagctctagccattctttcgcttgttctccagtcgttgccgttccaattactttaaatccctcaattttttcagtaaaacgacgatgaatgtccgcaatccgaatatcatcttctacaattaatacttcaatctcctcacccattactattcgcctctctctttcggtagtgcaataataaataacgcaccacctaaatcccctttttcgattgcaatacttccatttaaatcttctactaactctttcacttttgctaatccatatcctcgctctcctccttctttcgtcgaaaagcctttatagaatatgctagtaattatttcatcatgaatcccttgccctgaatcttccacttcaattaatatttcttctccaatatcagttacaaacatccttactttcttatcattctcttcatttttttcaattgcttcaaatgcattcgtaattaaatttcctaaaatagaaacgacataattactctcaatatgtggacttaatttgtctaaaccactttctctatctagcataaaatcaatcttcaactctcgtgctctattataaaatccaattaaaattccacctagccatggattttgaatccgcttcataataaattgaacaaaatcttgatataccgctgtttccttatgaataagctctaaagcatcttcgtatgattctaattggataagacctgaaagcgtatacaataaattgttatattcgtgcgcttgcgctcgtaatgcctctgtatattgcttcgtctgagataattctgctgttaactgatccatttcagatttcaaacgtaagctcgatacaacgccagttactttattctttactttaataggtagacggttcgcaataacagcctgtccttttatatttaattggcgatcaaactgttcttcaccagtttgaagtacatctagtatcgttgaattaggaattacatttaaaataaattccccaataatattttgttgtttatctagcgaaagaatatcataggctgcttgattgactaaactaatcatgccatttttatcgattacaataatcccttcacgtacagattgaatcactgtactatgctcttcatataaagatgaaatttcttctggttccataccgaacatcattctttttatacttgccgctaaatatatagagccgattactccaattaatagccctattattgtaatccaaaatacacgctttccatacacttctaccgctccatgaatatcatccattgaaaatccaacagacacaacaccaatgatttcattttcctgattacggattggaacttttccgcgtaatgaagggcctaatgatccagttgctttcgaaacatatgattttccttctaataaaacgcctttgttatctccaccaatcatcgcttctcctattttatctcgctcaggatgtgcatatcgaatcccctctttatttccaactacaatgaagtcagcctctgtatccattcgaattctttctgcaatcggctgaataatagaagctgggttttctttttgaaaagcttcctttatttcaggtatagcagcaactgttttcgcaacatgtaaagcccttttgccaatttgctcttctaccgtttcagataatatgtaataaaataaataactcgttagcataagtacaactaaaataagtatactaatagttaatgtaattctcggttggagttttaatttttttaacttcaaaaccattcccctaacatgattaaagatagaatttaaagaatatacagtctctttaattatacttaatcataacacggttactctatatttctttttctcttcataaaaaaagaaacgaagtaaaattactacctcgtttcttaacattcgttattacactttaaacttactaatcatctcttgtaattcttctgccatttgtgataaatggactgctgctgcatttatttcatctactgaagctaattgttcctcagaggaaccagcaatattttgaacgcttgctgcattttcttcaattgtagctgcaatttcattaatagatgcacttacttgttttgcatctaccgtcatttgttttgctacatctaccatgttatcaatttgtacaactgtatcatccgtagatttcaatatttcagcaaagctttgcttcgtttcatttgcaactacaagtcctgattgtacttctgctccaacttgattcatagagcttactgtttcttttatatcaaattgaatctctttcactagtttcccaatttccgtagaagactgtcctgattgttctgctagctttcgcacttcatctgctacaattgcaaatcctcttccttgctctccagctctcgcagcctcaattgccgcatttaacgctaataaatttgtctgttctgcaatatgttgaatcacttcaaggattgctccaatttgtttcgacttatcgtctaacaaaccaatgattttgtctgactgtgaaacagactcatgaattaattgcatttgattcacagtttgttcaactaacttcccaccattttcagcttttttcttcgtatacatagaggctgtagatactaatgaagaactatctgcaacacgctgaattccttctgtaacttcttctaacaatgttgctccttcttcaacttctttcgtttgtatttctgcaccacttgatacttgctctatcgcctgtgtaatttgttccgttgcttcgcttgtctgcttcatactagctgttaattcttctgaagatgccgctacatgacttgctgaagtgtttatattggaaatgacactttgtaacgatgcagccatctcgttaaaactttctcctagctgcccaatttcatctttagaatgaactgtaattgactctgttaaatcgccttcactaatctttttcgatgagataacaagttgttttaacggactaataatagaagcaattatgaagtaaattaaaatcccaccaattactaatgaaataccaataacagttattgttttatagaaaatagggttagctgcttcgataatttcttttgaaggcataattcctgctattttccatccagtctgcttatttgttataaaggtaatattgcgatcatcaccatcaagtttgaatttaaaatcacctgtttcttgtttatacaattccttctccactttttcttctaccttgtcacctggcttcatcgtcggatgcgctattacatttttagattggtcaaagattgctacatatccttttttgccgatattgaccatttttgaagtatttacaatatcattaataattaaatcaataccgagaacaccacttttatcctcattttgttttgctattgtaataacaatattccctgttgtacttgacttatatggggctgtgataaccacttctccgctttttttcgctgcttctttataccaatctctttcggtaggattatacccatctggcatttgaatagacggtgattgaataaattgtcctgtactagatcccgtataaactgcttctatttctggatgtaatttattatattcttctaatttattttgcacattttggagctgatcagttccgtaacttactccattaaataactttgtaaaatatactgcgtctacctttttactgtctatctccttgttaataacattatttaaaatctttacgttatcttccgctgattgtaaaattgtttcattaaaatttgtctttgcttgttgataagacgtccaaccaattacaatacttggaagaattaaaatgataacaaatgacacaagtaactttgtttttaaactactactccttaatttcccttgaaacatatttctacccctccataccgttttaaatgtaattatctcacatttaatttatttatataaattacacgattaattgtattaactctttgtctctttttctattaaagagttaatacatacctttttcattctatataaattaaataattaaaacaatatataaaaatgtatattattcgaaatattataattcacagaagaacctccagtatttcacttactagaggttctttccaccttactattctttatctttttctacttcttttttctcatcttctactacagatacaacaggtttatcacttgataattgttgtaccgctccttttccagcaaatccttctaatagctcttttaagtcaattccagaagaagcttttaacgtttcttgcatcgttgccattaaatcagttgcataacccgcaacttttccggcgccgctatttttaccaccgccgcctgtatcaacaactgtaattttatcaatgttactaagcggacttgcaacttccttcgcataacttggaagcattttaagaaccatatccataattgccgcttggccatataactcaaatgcctctgcaattttttgcttcgcttctgcttctgctaaaccttttaatctaataacatctgcttccgccgtaccttgtgctttttgtacttccgctttcgcttgaccttgcgctttttcgatttccgccttcgctaaaccttctacacgtacttcttccgcacgagctctcgcttcagcttcaatcttatattgatccgcatctgcctttttaatttgttttactttttctgcttccgctgattgctcaacagcatagcgatctgcatctgcttttttcttaacttctgcatcatattgcttttcacgacgcgcaatctctttttcttctaactcgatttgcttttcacgctcaatgattttaacgcgcatttgctcttctgtaacaccttgttgtgctttcgcttgttgtaattcgtaagaaagatccgcatctgcacgggcttgctcttgttccctcttataggactgtacttttaattctttatgtttttcagcttcagcgatttgtgcatcacgttgatattctgcttcttttgcctctttttcagcacgtgctttttcaatacgtgcttctttttcacgctctgcgttcgcaattgttgcatcacgcttaacggtcgcaatttgcggctgaccaagcgcatctaagtatccgtttttatccattatttctttaattgtgaaagaaacaatgcgaagtcccatcttctttaaatctgtagaagctacttcatgtaccttttgagcaaattgctctctattactatacgcatcctctactgtcatagaagataagattgcacgtaagtgaccttctaaaacctcttttgcttctacttttaactcttccgtttcttttcctaaatattgctcagctgcagtagatacttcttcaattgtagaacctactttaataatagaaacaccatttactgtaactggaacaccttgcttcgtatacgtatcacgtgtaccaacttctaatttgtagtttaataggcttaaaggttctgctctttgcataattggaactacgaaagtaccgcccccgcggataatcttaatcttctttccatcatcagtggtaacaacattctttcctccaccaagccagttccctgtaacaattaacgcttcatctggaccaaccgtacgatacttcgtaatgaatactaaaatgagtagaattaaaattgccagtaaaactccaccgataattaatggaatcgtcatgtaaattcccccttataattttggtttttttaaagaataagcgatgttttgtacaagtaaaacaccatcttggactccctcgataataacctctgttccttgcgaaatatctttttttccaactgttttagctgggattgcattacttccaaattgggatgaaattaatacttcaccaaatccttctgtaggaattgtcgtaatgacttctcctttgcaaccgataaattcatccatacgttgtacggtattttgctctgcttctgcaatcggttttaaaattagtattttcatgatgaaaacaccgataaaagatatagcaaatgcagccccaaaaatagtaatactattaaaggaaaacaaatattctcctatataactaagcccacataacatggcgaagaaactaagtaataaagtaacaacggatacagctccgcccccaaaactaaatatcgattcaaatatatctccaaagaagatataaataacagtgagtatagtagcaataataaatccatataaataaattgtttcaagtggataaccaaacaagaccatttcttatccccctttcttaaacaatcccttttttgttatatgtatgccccacctctttcaaagattatagttcttaattttcagttatttaccttttaaagaaaagcctgtaagacaggcctctaaaaaagaacaggagaaacctattgtgacaggctcctcctagaaaataaccgatatattatatatctatataatatactattttccacaaaaagtaaagttaaacatacattggaaagacacttattttactgataatttgtacgttccatcaccattatcatatttatatacatacaagtaatacttgcctggttttgcattaaatttcgcttctatatgattcccattggcttgaccgtaagctgcataattttgcatatctgattcatggtgaagtacccatgtcatcccaattccatactcatttaaaacagaaatgtcgatatctttcgctgatgctacattaaatgtataaacatcagtgtggtccccgccaataagactgccttttatcgtactatttagcccgatacgatttgcttcttctagacgattatttggttctgattctgttaaacttccatctttaatcgtaacagttgtttcgcttctgctctctttgcctttatcatcttttactcttaatgatactttataagaaccttctctttcatatacatgtactggattcacttctgcacttgtgcttccatctccaaattcccataaataagaaacaatttttccatcttcatcgtttgagccatcacttttaaattgaattccctcttttacaagaccgctataagggccatttatattaaccgttggagctttattttctccatcatcttttgcgattccatggaagactacatcatattcaaattcatttgaactattcacacgataattgacgaagtatgctgtaacagttttgtagccactccattctttttgcgccaattgttctaaagattcatttactcttttactcattgctttccaatcttctgattcaccttttgtgacactacctgtatacgtaccttctaatgtaaatgtattaaagaattgagaattatgttttgtcatttttgtatctttcataggcaacgtatcactaatttcttttttcacttcagttaacgatttcggtgcatgttcagctaaataatcatctgctacttccggtacattatatttatcttgattatcaattaactgctgcatatactcttgatactctttatttaacttaggatctttacttagattttcatgatatgcatcataatttttcacgtcattcgcacgaatcaaatcttgaattttatcaaatgtttcaaactgatgcgtatataagtaagactgcaatgcgaacgagtaattatagaaatcccaagaaccgtatttagcaaatagtgtacgctctgctgtataacggcttgcaggatcagatgataatccgctaattatactctttcttggtacaacgttattcgtacgagtagatcctgcgaaaaactctgcatttccttcttggaaccaagttagcctttcattttgatacatatctcctcttccaaataaaccaggaacttcatatctcccttgcagataatgagtaaattcatgacggaataactcttctaaactataaatactttgctctggtgtacgctcatatgtaaagaatgtacctgtctcttcaatataaattccaccgttgtttgtttcatatccatacaattgtctatttaactgatattcatctggactattataaattacgatcgttaatacatcatccgcatttcctggctctaacgctttgtcatttccaattacacggtgatactgtgcctttacttccttcgcagcccaatatagtctcttaattttttcttctgatactttatctcctgttttgaacacaattgatccatcgtcgaatgtatacgtttttggtaagtattgctcttttccttctttacgtattttctctaaatctactgtattcccgctataatctttaccattataatttgttgtaatttgttctaccgcaacaaaatacggttcacttaagcgcgggtacatatgcattgcttgtgtaacaacctctaatcctttatttggattactatgaaacttccctaaacggctagcaaaataaatgccattattaacaagccatttattttctggcgttacttcatttagaagagcaatacgatttatttcattaataaacccatctacttttccataccacatcgtttcattcgcttctttacgagcttcagttaagtacgactgtatatcatagtcaataccttgcatgatatcgtatattgcttgtcccttcattcgatcatttacataagtagtataattatcattgtattgctttaaaatattcgatgcgtattgaaccgtttcaacatcgcttgaagcattactaattaatttaccgtatgcagatacgactgtatcttgttcaactgtaccaagcttaaagtttggattgtttgcgattgcttttaaagcaggtaaacatttatcctggaagcttctttcatttaagtcgcttaattcactattataaaatgcaagataaaaagctgaacgcagcacttcagtaaacgtttgaattccttttgaatcatctttcgtaaatgtactacctctatgagctaattcatctataatgacttgcatttttcctttatctttataaaaagcctttgcatcttcattaaactggaataagtctgtaatttggtgccacttaatactgcctaacgtttcaactaattctcgatcattcattttgtttaaatcagccattgaatagctttctttaacttgctttactgcagttttcttcgtaatagatgctggtcgctgtgaaaaatctcctacttttaaacgttcttgaaatgataaagtttcatcaacttttgaaatatgtccaacttcatctaccgacttttcaattccaaccggtttcgttttcaacacgttatacggtactttttcttccgctgctgcatgagtttgaagtgcgcctaacgataaagccattgtactaatgctaagcatcactttattgatctttgatttcttgttcatatccttgccccctattttaatattccattcaagaatttaacataaaatctggatgtaacaatataaaatgcaatatttcatattatttcttcctataatttgtacatatcgtgaacacattgctctttacctccctaaaacaaattgcatcctttcacattataaaaaggtaattttttgacaattaaaaacttaattgttatgattattataattgttaactttattaaataagggtgggattctatgataaaaaaagaaaacagtgtattttatatctccttcttgctaacaacattattcattatatggggaattaccccagcaagttggatacaaggctacgatttacaaagtgttacatcttctttaaactcatttatcctcaataaatttgggtggttttactctctacttatgactacaatgattattttggctgtttatttagcattttctaagtacggttctattcgtcttggtaaagatggagaaaagccaaaatataattatccatcttggctatccatgttgtttggggcaggaatgggaattggactcctcttttatggaatcgctgaaccgatttcacattttacagatccattaacaggaaaagcggggacagaggaaagtgccaaactcgctatgcaatattcatttttccactggggactctttccgtggtcactatacgcaatggtcgctttaacaattgcatatttcacattccgcaaacaaaaaggtagcactatcggggctacagttactccattatttaatcgatcgaaaaattctcgtatcggaaaaacagttgatattctagctgttttagccacagtatttggcattgtgccatctgttgggattggtgctcaacaaattgctggaggattaagctatttattcccttccattcataacactttacttactcagctcgtacttatagctatcttcgccgttttatatttaacgagtgcacaaactggcttagatcgtgggattaaatatttgagtaacttgaatttctctcttgcaggtattttactcatctctttcttacttttaggaccaactgtatttattatgaaatatttcacatctacactcggttcttatatcggcgctttacctagtatgggattaaatttaggagcatttaatgaaaaatcttcttcttggattgaaaactggactattttctattggggatggtggatttcttggtctccattcgtcggtacattcatcgctcgtatttctaaagggcgcacaataaaagaatttatttttggagttgtattagtcccgactcttatctgtacattttggtttgcagtatttggtggtaccgcaatccatatggaaatgttccaatcgcttggaatagctgatgaaattgcaaaaaatggtacagagattggattatttgctgttatttcacatctaccattctctacatttttaacgattatcgggttaattttagtagccacatttttcgttacttctgccgattcagcaacatttgttgtttcaatgcaaacgagtaacggaagtttatcaccgaaaaatagtttaaaacttatatggggattaacaatcgcgataattgccgctattttattacaagctggaggattaaatgcactacaaatcgcagctataattgctgcgctaccattttctattgtagtcgttcttatggttacttcactctttaaagagctacgaaaagaagatgttaatttgcaaacgaaagaagtgccgaaaaaaataaaaaaggttatgtaacgattggcgcctcaaatcacttctaaatccgtaataaaacccattcatatgaaatatcattttcatatgaatgggtttttcactctattatatagtgttgtaaacatgctttttcctcaaagcctactttcttgtacaatttcatcgcacgatcattattcgtattcaaacatagtactatctctctcatcccttggaaggagaaaatatactgaattgcaacttgtaataactgctctccgacaccttttccatttatatcccccttaaaaaagacattatcataagcctatttcaaaatgaaactgccatgataatgtcttctcaaaaacttatacaattattttacaatataataagataacacgttatttatttcttaaataatctctttctaaatacaaacatactcagtgctgaaagaactaatactacgcctgaaagtaactttgatgtattcgcttgtccacctgttgctcctaatgatttcttactttcttcctgtttattagcaactggtttattttctttcacaacttgatgattcatgttttgttcttggactacttcggatggatttactgcttcttttgaaccttcaatttcttttcctgtttctttcccctccgctttcgactcttcaactcctgttgttagctcgtccacttcttcttttggctcttcaacttcttttgcaggttctttcacttcttctttcgatccttcaacttcttttaccggttccttcacttcttctttcgatccttcaacttcttttatcggttctttcacttcttcttttgtttcttcaacttcttttaccggttccttcacttcttctttcgatccttcaacttcttttatcggttctttcacttcttcttttgtttcttcaacttcttttaccggttccttcacttcttctttcgatccttcaacttcttttatcggttctttcacttcttcttttgtttcttcaacttcttttaccggttccttcacttcttctttcgatccttcaacttcttttatcggttctttcacttcttcttttgtttcttcaacttcttttaccggttccttcacttcttctttcgatccttcaacttcttttatcggttctttcacttcttcttttgcttcttcaacttcttttaccggttctttcacttcttcttttgtttcttcaacttcttttgttggttctttcacttcttcttttgcttcttcaacttcttttaccggttcttttacttcttctttttccactatattctgtataactgttccgttaaaccttatgctaatttcatcagaatctaaatcaaatttatacaccttttcacctggcgtattccattttattactccgttattaaacgtccctccctcacttgtcaattgaatattttcaatactttctccttctaaatcatatacaggaacttgaatttcttcgtttatttttgcatcatttaaaatgatattttgtcttccaacatcaattgtaaaccactgccctaattgtattaacgacctgacatcacgaatctcattcccagctagatttaagctaaataagtttagcatggaaccaataaccgttacatctttaatatgattgtccgcaagatttaaccactgtaaattttccaatgaagatagtggtgttatatcttcaatttgattatgagatacattcacattattcaattgtttcaagtttgagatgaactcaatatttttcaggcctactccttctaaagtgagtttttctaagttcgtcatgtactctaaacctgttatattttttatctcatttccattttctttaaatatctctaattttttaatctgtaataaatcttcttttgtaataggagcgtttaaattctctctacctaaattctctttattaatatgttgttgtaaagttttatcgagaattatattttccttttgttcattatcctcttttattgtttccttgatttcgtctaatctttcaacaacattttgaattactgttccattaaacttaatacgattctcttctggctttatatccaacgtaaattcatatattttttcaccagtagtcccccatttaacagaaccattattaactatcccatcttcactcttcaattgaatagtatcaagtggctctccttgtaaattatagataggtattttaacttccttatctttttctacattatctaaaaagattttttgtctttgaatatcgatatatatcctttttcctagctcttgaacaggtctaacatcacgaatttcatttgaacctagctttaaatcatataagtctgttaagtgactaagtggcgttatatctgaaatatagttttcttctaaattaagtgattgtacagtagataatcttgataaaggttcgatgttttctaattcatttttagcaagatctaactctactaattttttcattgatgtaatatgttcaatattcgtaagtccattgttacttaaagataagttttttacatttttcaattgctcaattccagcaaggttatcattactaatttgattatttgccacagtcaaagtccttaaagatttcactgtaaataatggtttaatatcttttatataattactatttaaatctagcattttaatcttcttcatttggcttaatgggcttaaatctgagattttattgtttctcaaagttaaaaactcaatatgctctaactcagccaaaggtccaatatcttcaagttcaccataggttatacttaatgattttaattgtctcaatcccgagataaattttatattttttaacttaacttcttccaaagttaagttttctaagttcgtcatatattctagaccgcttacgtcttgtattcctttatttttagcttcaacgactattaaagctttaacttttaataaatcttccttagttattggggtatctagattttctctattcaaattatatttattaatatgcctttgtagttgcttatctactattacatttccaattccatcttgttgatccactttatcctctttattttccttttgtttttctggaacattgttctctaaattcaatgtatttacttcaaactgtacttggtacttattatcataggccattgttggaatataaatatgcattcgcatattatacctttttcctaattcccctacttcaaaccgaatcactttcgttccatttttctttttatcttctgatattactttcacatcatgaaacacacctggagtatgaatatcctctgttttcaagtattgaaagaaatcactatcacttaatgttgctgttacaattttctttccattctcaattgttaatttcggatcctttatataaacagctgccatagactcttcattcgttttatctttatacgctttaataacagcatcatatgtaccatcttctaaaccttgtccagttttattcgcctcaattgctactgccgctaaagcaggtgttgaataaacagcaaacggaagtgataacgctgccgctataatcattgcatttatacgttttcttttattttgtttcaactttacatctcctccgaaatatataattcgaaatgtaatcatttctcgaataaacgataatgattttcattatcattgtcaactaggaaaataaaaagtttacaaaaaaagaacctctttaaaagaggttatgccattttctcacctgattcttctctaaaaaagcttttcatcgcatgaaatacgtctgctttttgctttaaaatatagtatctaaagttttcatctttaatatttttataggctgacatgagtgtactatggcggttgtactgattcacttccccatacccaaacatattacacttcttcattagctcttcaacaagttttacacatctagcattatctgatgttaaattatcaccatctgaaaaatggaatggataaatattatagcggtctggtgaatatttattatcgataagttcgagtgcttttttgtatacagaagaacaaatcgttccgccactttctccttttgagaaaaactcttcctctggaactacttttgcctccgtatgatgggcaataaattcaatatctactgtttcatactttgtgcgtaaaaatcttgtcatccagaaaaagaagctacgtgccatatatttctcccatattcccatcgatccactcgtatccatcatcgctaatacaacagcttttgaatctggctttaatacttcattccaagtgcggaactttaagtcttcttggtgaattggatgaaaagatgctttaccactcattgcatttcgtttatatgcggatatcattgttcttttcttatcgatatttccccataatcctgtttttctaatgtcattaaattcaacatgttcaatccggttttcatccatttcttttctctttaaattaggcagttctaactctctgaaaaacgcttgctctaattctaaaatagagacttcagcttcatagtaatcttccccagctgcatctcctgctccttgcccttttcctggccctttttgtttttgaccacctgatccatctctcgcaacgacatcaccaactttgctgtcaccgtttccttgcccaacatgtttatttttatcataattgtatctaatcttatattcatctagagaacgaattggtatttttacaacatccttgccattagacataactatactttcttctgttacaagatcgggtaaattattcttaattgcctcttgtactttttcttgatggcgctgttggtcgtcatatcctttgcgatggagggaccagttttcctgtgaaatcgtataatttggttgattttcttcgcccattcctttccctccttactgtaattgtcttcctgtatgaacagcaatctataaattttgttctgtaatgtgcaagctagaatgtttgaaaggtaactgcccacagaaaatcatcccataaacatttataacgtttttcatacaataccccgagcatcctaaacaaaattttgccactcacataatagaaagaaatattcagccactgataagaaagaaacacaatgcattgttgcacatatttttactttgcaacatattgtattgtgttggcttttttcgtatgaatggttggttactctatcatatgcatattgtaaaaataattgacaataaattcataaaattgcatcttaatttattacatttggacaaggtatgacactttatacacatatgaacggataataaaacgctgtcccgcaaaatacaagagacagcgttttgttatcaaactatctgtttaacaagctacctacatagcgtagtaattcatttgctgaagaagaattatagccatgctcatcaattaaacgcgcaacaacatcattgattttcttaagctgattttcgtccggcgttttcgttgacgttgtaattttcactatatcttttaaatcagcaaatagttttttctgaatcgcttcacgaagacgttcatgtgaattataatcaaagcgttttcctttacgggcataagcagaaatgcgaattaaaatctcttcacggaacgctttcttagcattttctgaaattccaatttgctcttcaattgagcgcattaatttttcatctggactcatttcttctcctgttaacggatcacgtaatttcgatttattgcagtacgcctcaacgttatctaagtaattatccataagcgtcttagctgattcttcatatgaataaacaaacgctttttgtacttctttcttcgcgatttcatcgtattcttttctcgctaatgagatgaagttcatgtaacgttcacggtcttcattactaatggatggatgctgatctagcccatcttttaaagatctaagtacatctaacgcgttaatagatggtacctcttttcgaatgattgtagacgaaattcggttaatgacataacgaggatcaatacccttcataccttcatcttgatattcgcgttgtaattcttctacatcaatcgcattataaccttctaccgtttccccatcatacaaacgcatctttttaattaaatcaatatccggacgcttcggatcttttaaacgagttaaaatggtgaacattgctgcaacgcgaagtgtgtgtggtgcaatgtgaacattcgatacatcactttcacgaatcattttttcataaatatgttcttcttcacttactcgtaaattataaggaactggcattacaataattcttgagtgcaatgcttcatttttcttatttgctataaatgagcgatactctgtttcattcgtatgcgctacaattaattcatctgctgaaataagcgcaaatcttcccgctttgaaattcccttcttgcgtaagtgataataagtgccataaaaacttctcatcgcattttaacatctcttggaactccatcattcctcggtttgccttatttaattctccatcaaatcgatacgcacgcggatctgattctgaaccatattctgcaatcgtagaaaagtccagactacctgttaaatctgcaatatcctgtgattttggatcagacgggctaaatgtaccaatccctgtacgacgatcttcagagaagaagatacgctctacaactacatcctcaattcttgatccgtattcttgctctaaacgcatgacatttagtggtgataaattcccttcaattctaaccccatactcatcaaagaaatcatctcgtaaatgatgtggaattaaatgcagtggatcctcgtgcattgggcatcctttaatcgcaaaaattgctccgcgatctgttcttgaatatgtttctaatcctcgtttcaacattgtaactaacgttgatttccctccactaacaggacccattaataataaaattctttttctaacatctaatcgttttgcagatggatgaaaatattcctctacaagacgttctagagcatcctctaatccaaagagctgattactaaagaagttatactttcttctaccatcaacttcttcaattccagcatcttttatcatattgtaaatgcgagagtgtgctgtttgagccacccatggtctttctttcacaagctccaaatactctgcaaacgtaccttcccattgtaaacgttcttctgctgctcgatgctgttcaatcttttttagaatatccattatagctcctcccccatctccttgttcaatcggattattataaaaggtatgctaggatgtccttaaacattctttaaatcaaaacgaaatatataatagcacactaaaattctctccaaaattcaaagaaaattctgtataatataggtattaacgtttttacactgctattcattataaataaattcttttcttctaagaaccttacatacattttgggtaataaataaaactcatgaaccgaaaaaagtaaggaggatattagtatgaaattattattaattttaggtgtatcactcacatttcttacagctatttttacatccggttacaatgacaaaccaggtacacataaaaaatgatgtgcttttagcacatcattttttttatttataatacatattttccatatcatatttggatagtggtcggctataataataaccttgtacaagcttcacattcttttctttcaaaaactgtatttgctcctttttttctactccttctgcaattacatttaattctaaagtatgagctaaatgaataattgcagctgtaatattcgtatcacgttcatctatatgtataccttccataaaagaacgatcaatttttaaagtatcaattggatatgtttttaaataacttaaagatgaatagcctgttccaaaatcatctaaatgaatctttaaattttgctcttttaattgtagtaacactctcttcgatatatctttatgtataagagctccttctgtaacctctatcgctaataaatgagttggtacattgtacttatttaaagcccgtgtaatcatctctattaatgtaatagaacgaaagtgtctagctgaaatattaactgcaattgggaccacatcataccctttatttaaccattcgcgcaattgctgacacacttgatttactacccattcatccagcttaataataaatcctgttctttctgccaacggaataaattggtttggagaaacaaatcctaattccttattctcccaccttattaaagcttccatactagctatttttttcgtttcaatattaatttgtggctgataatataagaaaaattcatttttttctatagcacgatgtaactggttttctattataaacctttgttcacgctcacagtctaatccactacaataaaaatgataatgtccttttcctttttcttttgctttttctaaagcagcatcgactctctgaaatagtattttttcatcttctccatctgttggagccattacaattccaattgacgcgcttaaatatacatcttcttcttcgattacaaaatattcactaatgttttttaatatgctttttgcaacttcctctacatattctttcgttatattttctatcaacataacaaattgatcatcgtgttctctaaataagtgcatatcttctatttttagattacttaaacattctgtaactttttgtaatactttatctccctctttatgaccaaatgtatcattaatacgatgaaactcatctaaatctataaatacaagtgcaaaatttacactctcatttaaaaaagtatttaacttatttgtacatgaaattctattcattaatcccgttaactggtcatagtaagctaaatattctgttcgcatttcgtttaatacttgccttgtaacatctctcgtaacaatataaatcccaacaatttcaccgttcacaataatcgggatagttctcaaagaaatatatagctcgtacccttctttatgaacatatttctttgaaacaatttgttttgcttttccttgcatcgatcccttaaatataatttgaaaatctttttcatattctttattaatgaattcaaaaataaatttattatttaattcctcataccggtatccaaatatttcatacgttgccggatttgcatatgtaactctccctatagaatctatagatataattgagtcattattatattccagtaacgacttaaataacatttgtttttcctctatctctgtcttctcctcaatttgagctgtaatatctcttgtaatacaaataacaaattgacatattccttcttcgtcgcagacaggattaagtgaagattcatagtgtatctcaccttttggtaaattgactacatcacaaaaggtgtgtgctttcgcttctctcactacttttgcatattgcctttgcaatatccccgctatatcttttggtaatacttctgcaaaggtttttccatagcactcttcgcttaacctagcataatccattcctattttattcacatacatatattgaaacgtttcattatcaataactttcaatatgaatactaaatcttgaatagcatgtaataatccttgtctaattaaatccatatctatcatacttaaaaaggtattttgattactatattcttccttcatatttatctcaacccgtcttatctatttttaatcatatatcccattctatatgattatgtcctctcttttaaatgtatgattatatattatttttattttataaaaaaaagtcgccatatggcgacttttaataaacgatttctaaatctaatccagggtaattttgttgacggaacgcttcataaattaaaattgctgctgtattagataaatttaatgaacgtactttatctgtcattggaatacgtaaacaatgatcaaagttttcttcgattacattagctggtaagccgtttgtttctcttccaaatacaaaatagtaatccttctcgcgcttgctatagtcaaacgctgtatgagctttctcgccatactttgttaaatagaagaattcaccgtctttatttttttcataaaattcttcaattgaatcataatacgtaattttcacgtgctgccaataatctaatcctgcacgctttaacattttatcatccgttgaaaatccaagcggtctaatcaaatgtaattctgttccagttgctgcacaagtacgagcaatattccctgtatttgctggaatttctggctgatataaaacaacatgtactcccacgcgatattcacctctgttttttgtctactacgtattataccacttgagcgaaaaatctctacccattaataatatgaaagaatttatatttcatttgtggtgtatatttactagagtcttcatagttccaataacgtcgacggctattcgctgaatgtgcatttacaagcggcataccatctgcatcttttgctactacaatcgtcgtatgattccatcttccgtcatcctcgaaatcataagcaatgacatctccaagaataagttcttctggcctctctaccgcctctgctcgaagtcctgttgtagcacctgacaaataccaataaaaagaatgtgcaacagcccagctccagctccactgattctccctttgccaccatcctttacgaatattaggatatccgctcataggtacttctccagtatgaagacattgagaaatgaaattcgtacaattatcagggaaattacgatacataggatttcggtcatcccaccaacgctctgcatatttcactgcctctaaacgattatactgataagaaccgtacttctctttcgtaatttccctttctaatgtctcacccattctaatttcttctgacacttcaatagcataatcgcctataattcgactattatttaaacaaactcttcgttttaattgttcctcttcaatataaaataattctttatgcttaattaaatatttaaaatgtatttgataatcaatttcttgatggtcattactatttaattgtctaatgaaagaaacatccgcagttgctttcactatatgtgcactacgtctttgaaacaattgtttctttctcagtgccatttgtagtaaatcctcagcaataccatccacattcgttcttttctccgttatatatgctaaaaattgttgtacttggttttcaatcttcgtttttacaaccattctgtctccctcccatattacaatatgaaaaagggaaatattatctactcttttttctgtgctaacaattcaagcccgcgattcatttcatgaagcacttcttcatctttctcacgttccatcgctttctcaatcgcttcgcctactccatctccgccaattttcccaagtgcccatgctgccgttccgcgtagtactggtcttgggtcatctttcataacaccaattaaatcaggaattgccgatgtttctttaaaatgtgctaatgctaaaatcgcatttctttgcagtggctttttccctctccatgatcctgacataatcccatatttctctttaaaatcacgattactaattgttaaaagtggtgttaataatggtttaactagctcaggatccggctccatctcaggatgattatgaaaatccattcctttgtttttcgggcaaacagtctgacacgtatcacatccatatatacgatttcctattttatcgcgatattcttcaggtaggaatcctttcgtctgtgttaaaaacgcaatgcacttcttcgaatctaactgtcccccctgtattaaagcaccggtaggacaaatatcgatacatttcgtacagcccccgcattgatcttctatcggcttatctggcgggaatggaacatttgtaatcatttcccctaagtatacgtacgaaccaaattcaggtgtaataatagagcagtttttaccgctccatccaatgcctgcacgctctgatacagctcgatcacttaattcacctgtatcaaccatggacttcacttctatatccggaagtttttcaattaaatatgcttctaatttttgcaaacgatctcgtaaaacaagatgataatcttgtccccaagaagcacgacaaaaaatcccacggcgttctccacgcttacttaatggtgcattttttaattttgaaggatatgctaaagcaatcgcaataattgatttagcacccggtaataacagttgcggattcgttctcttctctatatcaggctcttcaaatccagattgataatttaattgttgttgctggattaagcgctgctttaattcctcaaaaggagaagcactcgcaaagcctattttatctatgccaattgttttactatacgcaattacatcttgctttaattgttcaaaatccattcctaatcgcctcctcagatgaatccatcccttatgtaacgaccctattggttagtaattcacttttggaatactattatttacttctattttcgcatgtaattaggtttttcaaacattaaaaaacgcaatgcctcgtttatctcggaaacgaaacactgcgttgatcacaatttatagaaaaacatttaataaaatttggagcgggtgaagagaatcgaactctcgaccagagcttggaaggctcttgttttaccactaaactacacccgcaaatatgaattacatataagatattagaataacttatgtaaagtagtatagcatgtaaaaaaagtagaggcaagaattttatcgaaaaaagtcgaaaaagtgatgagagacctcatcactttttcaattctttatcaattgccttcttcatactatcgaaatcagggtttgcaagatttccgtttacatatacagaaggagcaccttgaacttttaatttttgagcacgatctgaatctttacgtactttttctttaatgtctttactgtgtaaatctttcttaaattgctctacatcaacttttggaagtttctctttcacaatgctaagaagcaaatcttctgtaatccattcttccgtatctttcttttgattttgataaatctcatcatagaaaatccagaatgaatctttatcttgtttataaattgcttcaccagctgctgcacctaaatccgagtcttttccgataaatgggaagttaataaaatataactgcactttgcctttatcaatatactcttcttttaatcgaggtaataccgttacatcccaagtacgacaagcaggacatttaaagtctccaaattcaactaccttaactggagcatcatctttccctaaagattgttgcgtagaataagcaaacatctcattccctttatcttttttgtcatttatgatgctatacgcaattgttccaattacaatcaatactgcgatagaaaaaactataccaagagccatgagtttatttgatttcatatacattcctctttaaattcatattctgtatacagcattgtacacaatacacataatatcaacacttatatacgtcacgcaatgaacacgctcacataaattacaaaaacacaataattgtgacgatattgtgtcacaatttgtcacaatttattcaaaaaaaagaagctcctctgtaggaacttctcttaacttactgcttttttacgcgcgctatttaacatcgactgctctatttttatatcatgacgaattactaatttctcactaactgcttgaacatactcatcatggcttatatagccttctttctccattagtctcaaaacgacatttcgtctctctactgctttatcatagttttgggcaggtgagtaataagcaggtgcttttactacagcagccatcattgcactttcagccaacgttaattggttcacctttttaccgaagtaaaggtttgctgctttttcaattccccatgctccttctccataataaatattacttacatataattttaaaatttcatccttcgtaaatgtgcgttcaatttttttcgtataaaaaatctctttccacttacgagaaaatgtacgttcatttgttaaaaaggcatttttagatagctgttgtgtaatcgtacttcctccttgcacgacaccaccagcctttatattctcaactgaggccctaataattgctatataatctaaaccgttatgatgataaaatcttttatcttctgtcgcaataaatgcatgtgttaatgattctggcacctctaacttagccggtacatgtaatttactaatatcacttttctcaatcattacatttccaacgaataataacgtacaacttaacaataataataatataatggctttataaaaaagtttagtcattggatttaatgcaactttttgatgatagttcaccctagataatactcgttctttcatcttgaacacctcttttccacacagcatataactcttactttaagaatacattgttgtaaaaaaatatcccatcgatttctcttacacgtaccttacatcattgtaaggtataaagtgaaactttaatgagccctcatcaatcaagcttactgcccagcaaatagtgggataaaaaagtattgtatcacagtatttttttatctactattcatctgaaatattgaatataggttatgttaaagcacgaataaccaataaaagagaaacccttaagactattatattttcactttacactttaattatatcatctacaaatatatatacttttgactatctagtaatctaaatgtatataacatatagatttattatacagaacaaatgttctgcaaatcaatactagtgctattattattttgacctttttcttaaacagtatacaaaaaagagtagtgattcgaatgtatctcaaatcggctactcttttctttacaatcttcctattaaattatacggctgtacttcccacgtttcatacggaataaaatgtgttgctctcattgcatcaagcgttctggatttcatatgaggacgcgttatatactcatctatgttctcttcatttaaatcaacaaatttacccacttgtatctcttcgggttgagtttttatttcaccacttatatatgctactttaaaaacaacagctagaatatgcatagaggtattataataaacccctgtaattccgataggcttcaccgttaaccctgtttcctcttttatttccctacagacagcttgatcgagcgcttcgccttcttctacctgtcctcctggcaactcccacgtatcagctcgccagtgcacttttgttaataacacttcatttttttcatttgttaaataacctgctacagcaactatatgctttggtgtcttatgttccatattaagcctcctagagataatgaatattttgtatatccctataatcatattcactacctacaacaaaatacctttaatacttcatcaccttaattaacttcataaaaaagaccctatccgctaagcgaaaagggtcatctatcgtattactctcctaagtctacgttgtgataaacttgttgaacatcttccaaatcttctaatgcatcaaccattttctcaaattgtgcttgagcatcttcaggaagtgttacatcactttgtgcaagcattgttaattctgcaactgtaaactcctcaacgccagcacctttaagtgcagattgtactgcatggaattgatctggttcagcatacacgataacagaatcttcttcttctagaatgtcacgtgcatctacatctgcttccattaaaatttcaagaacttcatctgatgttttaccttcaaggccgataacagctgtcgcatcaaacatgtaagctacagaaccgttcacacccatattaccactgtttttgctaaatgcagctcgtacatctgctgcagtacggtttacgttatttgtaagtgtatctacaataaccatagctccatttggtccgaatccttcataacgaagctcgtcataattttcttctgaaccgccttttgctttttcaactgcacgatcaataattgttcttggaacattgtatgttttcgcacgctctaatacaactcttagcgcttggtttgattctggatctggctcgccttgttttgctgccacataaatttcacgcccaaatttcgcgtatatacggcttgtatttgcatcttttgatgcttttttgtctttaatattgttccatttacggcccatactttccactctctttcccgttttaaatctacataaaaatattaatatgaaatataatgtgtgttcaacacatttttaaaagaaatataaaaagttcatttttgattcatattatagacataatataaatcactatcattttgttctttcgacaagttatattatacatgaattcctacgtttattacgaattttagaagcacatagtataatttaacaaaaagactctaacatttctgttagagtctttttatattgctgacacctattcccataattactttctattgttgtataataaaaatagggaaaaatttgaagaaaagagagaaggagaattatgacacattcaaatgagaaaaaagcacatagtcttaaagggatagaagaaaagttaaacccaactatctatcaagtgagattcatgaaattagatgaaccaattcaatttgagtcgttccctgaattaaaagatttaggggactggttaagtacttcaacgcatatgtgggcgtgccactcaactatgtataagtacaacagagaagggtttgaaaagaagtttttagagattacaaacttaaccgttgatagtgtactaatatctactggtggtatcggatttaacttcatgtcaccggggtggagaaattctctctagagtactcgaaagaaatattgtatatacaatactttttctgcttattttgtcatgtaatgaaaagaaaacaaaaaagctctatactaattgtatagagcttttttacgccgttcatgataccgatggtcggggtcgaaccgacactcccgaaggaacacgattttgagtcgtgcgcgtctgccaattccgccacatcggcacaaaagaaaaggcggcaaccggatttgaaccggtgataaaggttttgcagacctctgccttaccacttggctatgccgccatattaaattttattggagcggaagacgggattcgaacccgcgaccccaaccttggcaaggttgtattctacgtgacatgtggagctgacgaatactaatagatcgaggacttaaccatataatatgtagcaatgttatctagttttgaaggaatatgccttcatagtttggtgatgatggcagagaggtcacacccgttcccataccgaacacggaagttaagctctctagcgccgatggtagttgggaccttgtccctgtgagagtaggacgtcgccaagcaaaaacctaagtcgtttcgacttaggtttttttgtgtttatttttatttaccgaaggctataatccataaatttaataaagctaaagacgaaaaaagaatgaaatagagactgtttaaaataatagcaatgattttttgtgttcctgattttcctaatgccactaaagtaatacttaaaataggacaaattattactatcataagtatatattttaaataatgagatgctataaataagtatttaataattacagaaattactgcaatagagaaaaataaataggataatagcatagttctttctttaacagttatcctctttagaaattaaatcgttataataatacaagagtgtatatattttgatttaaaacatactgaagtgccatttaaacgattatacgtaaaatagatctctagaaatatatattctaattcccttttcttcttgcatatagttgcaattcttcttttgaatataactaaaacacgaacgttattgactactaataaaaaaacattcgattatttattgacattgtttatgaaatattgttaatataaccatagaaacaataatataagacctcatataatcgcggggatatggcctgcaagtctctacctaacgaccgttattcgttagactatgagggaaagtcactcggtatttttctattcacaagggatacgtatgcctgagtagagcgctttctctcatagtaaaagagaaactgttctatttcaggctttttttatttgaatcggggggattctaatatgaaatcactagttggagtcataatgggaagcacgtcagactgggaaacaatgaaatatgcttgtgacattttagatgaattaaatataccgtatgagaaaaaagttgtatccgctcatcggactccggattatatgtttgaatatgcagagacggctcgtgaacgtggattgaaagttattattgctggagctggtggagcagcacatttaccaggaatggttgcagcgaagacaaatcttcctgtaattggagttccagttcaatcaaaagcattaaaaggcttagattcattattatccatcgtccaaatgccaggaggtgttccagttgcaactgttgcaattggtaaagccggttcaacgaatgctggattacttgccgcacaaatacttggatcattccatgatgatatacatgatgcattagaattgagacgagaagcgattgaaaaagatgtgcgtgaaggtagtgagctagtatgacgaggatcattttacctggaaaaacaatcggtattattggaggcggccagctaggaagaatgatggcattggcagctaaggaaatgggatataaaattgctgttttagatcctacaaagcattcaccatgtgcacaagttgctgatattgaaattgttgcaccatatgatgatttaaaagcaattcagcatttagcagagataagtgatgttgtcacatatgaatttgagaatattgattatagatgtttacaatggcttgaaaaacatgcgtacttaccacaaggtagtcagttgttaaatacaacgcaaaatcgttttacagaaaagaatgcgattgagaaggctgggttaccagtagcaacgtatagattagttcaaaatcaagatcagcttacagaagcaattgctgagttatcattcccttccgtcttaaaaacgacgacaggtggatatgatgggaaaggacaagttgttttaagaagtgaagctgatgttgagacagcaagaaatcttgtggataaagcagaatgtattttagagaaatgggtgccttttgaaaaagaagtatcagttattgtgattcgtagtgtaagtggtgaaacaaaagtgtttccagtagcagaaaatattcatgtaaataacattttacatgaatctatcgttccagctcgcattacagaagagctttctcaaaaagcaattgcttatgcaaaagtacttgcggatgaattagaacttgtgggaacactagctgtagagatgtttgctacagataatggtgagatttatattaatgaattagcgccaagacctcacaattcaggacactatacacaggatgcatgtgagacgagtcaatttggtcaacatattcgagcaatctgtaatttacctctaggagaaacaaatttgttaaaaccagttgtcatggtaaacattttaggcgaacatatagaaggggtcctaagacaagtgaatagattaaccgggtgctatttacacttgtatggaaaagaagaagcaaaagcacagcgaaaaatggggcatgttaatattttaaatgataatattgaagtcgctctagaaaaagcgaagagtttgcatatttgggaccatcaagaacaactgttggagggaaaaagatgattagtcgttatacacgcccagaaatgggtgcaatttggacggaagagaacaaatttaaagcatggttagaagttgagattttagcttgtgaagcatgggctgagcttggcgatattccaaaagaagatgttaagaaaattcgtgagcatgcatcatttgatattgatcgtatttatgaaattgaaaaagaaacacgtcatgacgtagttgcattcactcgtgctgtatcagaaacgccagcattaggtgaggaacgtaaatgggttcattacggtttaacatctacagacgtagtggatacagcattatcttacatcttaaaacaagcgaatgaaattatattaaaagacttagagaactttgtaagcattttagctaacaaagcgaaagagcataaatacacaatcatgatgggaagaacacatggtgttcatgcagaaccaacaacatttggtttaaaacttggtctttggtatgaagaaatgaaacgtaacgtagagcgtttcaaacaagctgctgatacagttcgtgttggtaaactatctggtgcggttggtacatatgcaaatatcgatccattcgtagaaaaatatgtttgtgaaaacttaggattagaagcagcaccaatttcaacacaaacattgcaacgtgatcgtcacgcacactacatgtcaacacttgcactaattgcaacatctatcgaaaagatggcagttgagattcgtggtttacaaaagagtgaaacacgtgaagttgaagaagctttcgcaaaaggtcaaaaaggttcttctgcaatgccacataaacgtaatccaattggttctgaaaatatgactggtttagctcgtgttatccgcggttatatgatgacggcttacgaaaatgttccattatggcatgagcgtgacatttctcactcttcggcagaacgcgtaattttaccagatgctacaatcgcgttaaattacatgttaaatcgctttggtaatatcgttaaaaacttaactgtatacccagagaatatgaaacgcaatatgacaagaacatacggcttaatttattctcagcgcgtaatgcttacactaatcgacaaaggtatggtacgtgaagaagcttatgatatcgtacagcctaaagcgatggaagcttgggaaacacaagtacaatttaaagagcttgtagaagctgatgagcgtattacaagcaagttaacacaagaagaaattaatgaatgcttcaactatgagcatcatatgcaacacgttgatacaatctttgaacgccttggattaaacgaagcgtaaaatttcatatggcacagaatagagtcattctgtgccattctttataaaaacattattcacatttttcaaactacagggggcttgcgaaatgcaaaagctagaattgctgtatgaaggtaaggcaaaaagaatttatcgtacagaatcagcagatatggtttgggtagagtacaaagatagtgcgactgctttcaatggggagaaaaaagagacgattacagggaaaggtcgtttgaacaatgaaattacaactttattgttcagaaagttacaagaagtgggaattaaaacacattttgttgagaagttatctgaaacagaacaacttgttaaaaaagtgagtattattcctttagaagttgtcacaagaaatgtaattgcaggaagtctttcaaaacgattaggaatggaagagggaactgtacttgcagaaccaatcgtagaattttacttcaaagatgatgatttaggagatccgcttgtaacggaagatcatattcgtgtattaaacgttgcatcaccagagcaagtaagcgtattacgagatatggctctacaaatcaatcaagtgttgattgatcatttcgcaagctgtcgtgtaagattagtagatttcaaattagagtttggtgtaacggaagaaggagaaatcattttagcggatgaaatttcaccagatacttgccgtttatgggatgaaacgagcaatgaaaagtttgataaagacgtattccgtcgcgatcttggaaatttaacagatgcttatgaagagattttaaaacgtttagggggaatttcacatgtataaagttaaggtatatgtaacattaagagaaagcgtattagatccacaaggaacagcagtaaaaggagcacttcatagtctttcattcacagaagtacaagatgttcgaatcggaaagtacatggaactaacaattgataaatctgtatctgatttagatagcaaggtaaaggaaatgtgtgaaaaactattagcgaacgttgtaatggaagacttccgttatgaagttgaggaggttgtcgcacagtgaaatttgccgtaatagtatttccgggttcgaactgtgatgtcgatatgttccatgcaattaaagatgagcttggcgaagaagtagattacgtttggcacgatacagagaatttagatgaatatgatgcaattctactaccaggtggattttcttatggtgactacttacgctgcggtgctatctctcgctttgctaatgcaatgaaagcagtgcaaaaagctgctgagcaaggaaagccgattttaggtgtatgtaatggattccagattcttgttgaatcaggattactaccaggagcgttaatgagaaacgaaaacttaaaatttatgtgtcgcactgttcagttgcgtgttgaaaataatgaaacgatgtttacatcacaatatggaaaagatgaagtaattaatattccaatcgcgcatggtgaggggaattactattgtgatgaagcgacgcttaaacaattaaaagagaacaatcaaatcgcattccgttacgtagaaaaccctaacggtagcgtttcagatattgctggtattgtaaatgaaaaaggaaatgtacttggtatgatgccacacccagagcgtgctgtagatgaattacttggtggtgctgaagggttaaaagtctttcaatctatcttaaaacagtggagggaaacatatgtcgttaatgcttgaaccaaatccaacacaaattaaagaagagcgtatatatgcggaaatggggctaacagacgaagagtttgccatggttgaaaagattttaggtcgtctgccaaattatacagaaacagggttattctctgtaatgtggtctgaacattgtagttataaaaattcgaaaccagttcttcgtaagtttccaacgacaggtgagcgcgttctgcaaggacctggagaaggtgctggaattgtagatatcggtgataatcaagcagttgtatttaaaatggaaagtcataaccatccttcagctattgaaccatatcaaggagctgcaacaggtgttggtggtatcattcgtgacgtattctctatgggagcacgtccggtagctctattaaactcacttcgtttcggtgaattacagtcaccacgtgtgaaatatttattcgaagaagtagtagcaggaattgcaggatacggtaactgtatcggtattccgactgttggcggcgaagtacaatttgatccatgttatgaaggaaatccacttgtaaatgcaatgtgcgtaggtttgattaaccacgaagacattaaaaaagggcaagcgcacggtgctggtaacacagtaatgtacgtaggagcatcaactggtcgtgacggtattcacggtgcaacattcgcgtcggaagaactatctgaaagctcagaagcgaaacgtccagcggttcaagtaggggatccatttatggaaaagcttcttattgaagcgtgtttagaattaattcaatccgatgcacttgttggaattcaagatatgggtgcggctggtttaacatcatcatctgcagaaatggcaagtaaagcaggaatgggtattgaaatgtacttagatgatgtaccacagcgtgaaacaggaatgacaccatatgaaatgatgctatctgaatcacaagagcgtatgttaattgtcgtgaaaaaaggtagagaacaagaaatagtagatttatttgagaagtatggtcttgcagcggttacgatggggaaagtaacagaagataaaatgcttcgtttattccataaaggtgaaaaggtagctgaagttccagcagatgctttagcagaagaagcaccaatttatcataagccatcaaaagaagcagcatactttgctgaattccaagcaatgaaaatggaaacgccaaaagtagaaaattataaagaaacgttattcgctttattacagcaaccaacaattgcaagtaaagagtgggtatacgatcaatacgattaccaagttcgcacaagcacagttgttacgccaggttcagatgctgcagttgtacgtgtacgcggtacagaaaaaggattagcaatgacgacagattgtaactctcgctacatttatctagacccagagatgggcggtaaaattgcagtagcagaggcagcgcgtaatatcgtatgttctggcggagagccacttgcaattacagattgcttaaacttcggtaacccagaaaaaccagaaatcttctggcagattgagaaatcagtagacggtatgagtgaagcttgtcgcacattacaaacaccagttatcggcggaaacgtatcgatgtataacgagcgtagtggtgaagctgtatatccaacaccaactgttgggatggtcggacttgtgcatgacttaaaacatgtaacaacacaagagtttaagcaagctggtgatttagtgtatgtaattggtgagacgaaagctgagtttggcggaagtgaattacagaaaatgattcacggcaaaattttcggtcaatcaccaagtatcgatttagatgtagaattaaaacgccaaaaacaagtattagaagcaattcaagctggtcttgttcaatctgcacatgatgttgctgaaggtggtttagcagttgcgatttcagaaagtgcaattggtgctaaaggcttaggtgctactgtgaaattagatggagaagcaacagcagcattattcgctgaatcacagtctcgcttcgtgataactgtaaaacgtgaaaataaagaggcgtttgagaaagcagtagaagcaatccaagttggagaagtaacaagtacaaatgaagtaacaattcataatgaagaaaatgaagtattacttacagcaaatgtagatgaaatgagaaaggcttggaaaggggcaatcccatgcttgctgaaataaaggggttaaacgaagaatgtggcgttttcggaatttgggggcatgaaaatgcagcacaagtttcatactacggattgcacagtttacagcatcgtgggcaagaaggcgcaggcattgtcgtaaataatggggaaaaaatcgtcggtcacaaggggttaggtttaatatcagaagtgttttcaagaggtgagctagaaggattaaatggaaaatcagcaatcggacatgtacgatatgcaacagctggtggaagtgaagttgctaacgttcaaccattgttgttccgtttttccgatcatagtatggcgttagctcataacggaaatttaattaacgcaaaaatgcttcgtcgtgaattagaagcagagggcagtatttttcaaactagttcagatacagaagtacttttacatcttattaaacgtagcacgaaagattctttaattgaaagtgtaaaagaggctttaaataaagtgaaaggtgcgtttgcgtatcttttactaactggaaatgaaatgatcgttgcattagatccgaatgggttccgtccgctttcaattggaaagatgggggatgcttacgttgtagcatctgaaacatgtgcttttgatgtagtaggtgcaacatacattcgcgatgtagaaccgggtgaattacttatcattaatgatgaaggaattcacgtagatcgtttcacaaacgatgtagaacatgcaatttgtagtatggaatatatttactttgcacgaccagattctaatattgctggtgttaacgtccatgcagcacgtaagaatatggggaaacgtttagcggcagaagctcctattgaagcagatgttgttactggtgtaccagactctagtatttcagctgcgattggctatgcggaggcgacaggtattccatatgagttaggattaattaaaaatcgttacgttggacgtacgtttattcaaccttctcaagaactgcgcgagcaaggggttaagatgaagctttccgcagtaagaggtgtagttgaagggaaacgagttgttatgattgatgactctatcgtaagaggaacgacaagtaaacgaattgttcgtatgcttcgtgaggctggagcgacagaagttcacgtaagaattgcttcaccacctctgaaatatccatgtttctatggcattgatattcaaacgagaaaagaattaattgcagcaaatcatacagtagaagaaatccgtgaaatgatcggagcagattctttaacatttttaagcgaagatggattagtagatgcaattgggcgtccatatgaagggaaatatggcggcctatgcatggcttactttaatggggactatccaacagctctttatgattatgagcaagagcttttagaaagtatgaaataagaaaagtgagaaaagcttctacttcttttgatgtaggagctagatcctttcttaaaatagcccgccctggatggggagaaattaaaagacgaggtgtaaataacgatggcgaatgcatataagcaagcaggagtagatattgaagctggatatgaagcggtatctcgcatgaaaaaacacgtacaaacaactatgagaaaagaagtactaggcggtttaggcggttttggaggtatgtttgatctatcaaaatttgcattagaagaacctgtattagtatctggaacagatggcgtgggaacgaaattgatgctcgcttttatggcagataaacatgacacaattggtattgatgcagtagcaatgtgtgtaaatgatattgttgtccaaggagcagagccgcttttcttccttgattatattgcttgtggtaaagctgaacctagtaaaattgaaaacatcgtcaaaggtatatcagagggctgtcgccaagctggttgtgcattaatcggtggagaaacagctgaaatgccaggaatgtattctacggaagaatatgatttagctggttttacagttgggattgttgataaaaagaaaattgtaacaggtgaaaagattgaagctggtcacgtgctaattggcttagcatctagcggtattcatagcaatggttactctttagtacgaaaagtgttattagaagatggggaactatctttagagcgtatttatggccgcttagaactacctcttggtgaagaattattaaaaccaacgaaaatttatgtcaaacctattttagaactattgaagaaacatgaagtatacggtatggcgcatattacaggtggtggatttattgaaaatattccacgcatgttgccagaaggaatcggtgctgagattgaactaggatcttgggaaattcagccgatctttagtttgcttcaagaagttggaaaactggaagagaaagaaatgttcaatatttttaacatgggtattggtatggtagtagcagtgaaggaagaagatgcaaaagatgttgttcgtcttcttgaagagcaaggagaaatggctcgtattattggacgtactatacaaggagctggcgttacttttaatgggggcacagcactatgagtagattagcagtttttgcttctggaagtggatctaactttcaatctctcgttaatgcggtagaagaaaaaagattggatgcagaaattagtttattagtatgtgataaaccagaagcacgagctgttggacgggcaaattatcatcatattccgtgttttgctttttcagcgaaagcatatgagtcaaaagaagcgtttgaaaaagagatattaaagaagctagaagaatatgaaattgattatgttattttagctggatatatgcgtttaatcgggccgacgttactagaagcatacggcgggaagattattaatattcatccatcattactaccgagctttccgggtaaagatgctgtcggtcaagcgttagaagcaggtgtgaaagtaactggagtaacaattcattatgtagatgcaggtatggatacagggccaattattgcacaagaagcagtggttgtttctgaaggggatacgagagaaagcttacaaaagaaaattcaacaagttgaacataaattatacgtaaatacagtgaatcaaattgttcagtctgtgaaagaatcaactgttaactaacatacaaccaggggtgaaggataaatgaaaaagcgtgcattagtaagtgtttcagataaaacaggagtagtagaatttgttaaagggttactagaacaagggattgaagttatttcaacaggtggtacgaaaaagttactagaagaaaatggcttacaagtaatcggcatttctgaagtaactggtttccctgaaattatggatggccgtgtgaaaacattacatccaaatattcatggtggtctattagcagttcgtgataatgaaacacatgtaacacaaatgaatgagttaggtatagagccaattgactttgttgttgttaacttatacccatttaaagaaacaatcgctaagcctgatgtaacatttgctgatgcaattgaaaatattgatatcggtggcccaacaatgattcgctctgctgcgaaaaatcataaattcgtatcggtaattgtagatccagtagattatgatattgtgttagcagaactgaaagagaacggtgaagtagcagaggaaacaaaacgtaaactagcagcgaaagtattccgtcatacagcagcgtatgatgcgttaatttctaactacttaacagagcaaatgggtgaagaaagtccagaaacattaactgtgacatttgagaaaaagcaagacttacgctatggcgagaacccacatcaaaaagcaactttctataaagcgccattcgcagcaacgtcttctgttgcatacgcagaacaattacacggtaaggaattatcgtataacaatattaatgatgcagacgcagcgcttagcatcgtaaaagaatttacagaaccagcagtagtagcagtaaagcatatgaatccatgtggtgttggagtaggaactaatattcacgaagcatatactcgtgcttatgaagcagatccagtatcaatcttcggcggtattattgcagcaaatcgtgaaattgataaagctacagcagaaaagttacatgaaattttcttagaaattgttatcgcaccttcgttctcgcaagaagctttagaagtgttgcaaagtaagaagaacttacgtttattaactataaatattgaaaaagcgacaagtgcaagcaaaaaactaacttctgtacaaggtggacttctcgttcaagaggaagatacgttatcattagatgaaagtacaatttcaattccaacgaaacgtgaaccctcagagcaagaatggaaagatttaaaactagcttggaaagttgtaaaacatgtgaaatcaaacgcaattgttttagcgaaagatgacatgacaattggtgtcggtgcgggacagatgaaccgtgtaggttctgcaaaaatcgcaattacacaagctggtgaaaaagcacaaggtagcgcgcttgcatctgatgctttcttcccaatgccagatacattagaagaagcagcaaaagcaggaattacagcaatcattcaaccgggcggatcaatccgtgatgaagattctattaaagtggcagatacttatgggattgctatggtgttcactggcgtacgtcatttcaaacactaatagaggatgtttaaaaagtccggttaagataaccttcgcatgtcgtcgttgcatcgccagtgcggtactcatgtagaaaagctacactccgtgtcctcctggcaaatgcgcctagacctgctcggttctcttaatcctcctttttaaacctttattgatatggatgtttaaaaagtccggtcgagataaccttcgcatgtcgtcgttgcatcgccagtgcggtactcatgtaggaaagctacactccgtgtcctcctggcaaatgcgcctagacctgctcggttctcttaatcctcctttttaaacctttattgatatggatgtttaaaaagtccggtcgagataaccttcgcatgtcgtcgttgcatcgccagtgcggtactcatgtaggaaagctacactccgtgtcctcctggcaaatgcgcctagacctgctcggttctcttaatcctcctttttaaacctttattgatatggatgtttaaaaagtctggtcgagataaccttttattgatatgaaaaagcaaactaggagcatagcttctagtttgtacttatttaattattgggggatgaaatatgaatgttttagtaattggccgcggtgggcgtgagcatgctttagcttggaagtttgcacaatctgaaaaagtagaaaaggtatatgtagcaccaggtaatgaaggtatgagagatgttgcaacaccagttgatattgatgaaaatgattttgatgcattagttttatttgcaaaagagaataatgttgagttaactttcgttggaccagaaattccgcttatgaatggaattgttgatcgttttaaagaagagggacttcgcgtatttggtccgaataaagcggctgctgttattgaaggtagtaaagcttttacaaaagagcttatgaaaaagtatgatattccaactgcggcgtacgaaacttttacagattatgaagaagcagtacagtacattcaaaaagttggtgcaccaatcgttattaaagctgacggcctagctgctggtaaaggtgtaacggtagcgatgacgcttgaagaggcattacaagctgtgaaagaaatgctgcaagatgtgaaattcggcgcggcaagtaagaaggtcgttattgaagagtttttagatggacaagaattttcattaatggcattcgtgaatggaacaactgtacatccaatgataatcgcccaagatcataaaagagcttttgatggtgataaaggtccaaatacgggcggaatgggtgcatattctccagtaccacaaattccagaaacagcagttcaagaagcgattcaaaccgtattgcatccaactgctaaggcgatgattgaagaaaaccgttcgtttacaggtattttatacgcaggtcttattttaacaaatgatggtccgaaggtaattgaatttaatgcacgcttcggtgatcctgaaacagaagttgtattacctcgattagaaaacgatttagttgatgtatgtaacgctgtattagatgaaagtgaactaacgttacaatggtcagaagaagcggtaatcggtgttgtacttgcttctaaaggatatccagaagcatataaaaaaggtgatattattagcggactagatgcactgcaagatgtgattgttttccatgcaggtacagcaatgaaacatggggactttgtaacgaacggtggccgtgtattatttgttgcttgtaaggcaaatagtttacaagaagcaaaagataaagtatataaagaaatcggtaaaattgagagtgatggtctattttatcgaagtgatataggatatcgtgcaattgggcatgagatgacgaaaagttaatatgtaaaaatcccgctgaggaatcagcgggattttttatgcatcttcatctttttttaatttccctttttgctttgccatttctcgaagtaaatactcgatgtgtgcattgacgctacgaaattcatcatttgcccatttttcgatgactgcgtgtaattcaggatcaatacgtaatggaaagcttttctttttagccataattacttatagcccttagtataggcttcctgtattaataactggctgcgcacctttatctgaaacgatggcaactaataagttgtttaccatatttgctttacgctcgtcatcgagttctagtacgccttcttcatctaacatatggatggaatctttcgccatcttcacagcaccttcaacaatttcttttctagcagctaatactgcttttgcttgctggcgttgtagcattgcatgggcaatttctgttgcgtaagctaagtgcgttaaacgagtttctaatacttctacaccagcaatttcaagacgcgcctctaactcacgttttaattcttcagagatttcttcagtatttccgcgtaacgtaacgcaggtttcatcttggaaattgtcataaggatattttgttgcaacatggcggattgccgtttcgctttgaatttctacaaatcgatcataatgttcaacaccaaacattgcttttgcagaatcaacaactttatatacgataacagctgcaatttcaattggatttccatcaacgtcatttacttttaattttttactgttaaagttttcaacacgtaaagatacagtttgacggaatgcgaaaggaatcgttaaaaataaaccgttttgacgaattgttcctaaataattaccgaagaacgtaataaccttcgcttgattcggttgaacaataccgatacctgtagcgagaactgcggctaatataatagttagtgccgctcctatgaaaatttcttgtgcaaggaaaaatacaccgatagcagctaaaatcaaaattccaataataccgagaaaaccatttacataaaatacttgtttttctttcatatgatcgcctcctgatataaaaatgatatcacttttatatcattttaagcaagaggtatgcatctaattttctgaattttattggttgatatcttttatatacattttaaggttcaaaaagagaatatacgttctgttttatagtaaaataaagaagacttaaccgcccactgcagcagctaagtccctttgagagcatcttgcatcgtgacaaatgattcaaagcggttttgccaggattatatcttcaatcgctgactcaatctctttgtcagaagcgtcataacttccttttgactctggcttgtcatgagtggaagtttgattcacttcttctttagcatgtcctttttcaccaaaattcatgctaggcattttaaatgcccccatattcatgtattttccgaatttccacatttcaacaacagggcagaaacgaacaattccttctgcaactttcattgcaccaatccatagaaaaatgttagaccaagtgcaccacggcttgcgtacaagtttagttgcactacatccgaagaggacgagcccaagtgtaattcgaattagagcgtttattgtcccgatattttgcttcattagaaaaacactcctttttatgaaagttgaaatagataatactatttctcttattagtatcccgtttgatttttgggatatgtaatccaacatttgacgtggaaaaagatgttggattgtgcgtgtgtgtaagtaactttttttgttataatgaaagaatgcataaaaggaacttcaaaattaaatcctctagtttaaaaaatatggaagaggtaattccaaacttaattctccgttttaaacaaatatttaagatgaagttaaaacaataatgatgaaaataaactgttattttgaacagaaatatatataactagagaaaaggaagggtgttttcatgtacgatatttccggatggaaacatgtatttaagcttgatccaaataaggagttaagcgatgaacatttagaaatgatttgtgagtctggaactgatgcggttattgtaggcggaagtgatggagttacaattgataacgtattacacatgctagttagcattcgtagatatgcagttccttgtgtattagaggtttctgatgtagaagcaattacaccaggatttgatttttattacatcccaagtgttttaaatagccgaaaagtagaatgggtaacaggtgttcatcatgaggcattgaaagaatttggggatattatggactgggacgaaatttttatggaagggtattgtgttttaaatccagaagcgaaagtagcccagcttacagaagcgaaatgtgatttaacagaagatgacgttattgcatatgctcgtttagcagacaagctattacgtttaccgatattttatttagaatatagcggtacgtatggagatgttgaacttgttaaaaatgtaaaagcagaattgaaacaagctaagttatattatggcggtggtatttctaatgcagaacaggcgaaagaaatggcacaatatgctgatacagtagttgttggaaatattatttatgatgatataaaatcggcgttaaaaatagttaaagcagtaaaaggagagtaggtgcaggcgtatatgagtatgacagataagttattaaacggtttaaatccacagcaacaaaaagcagtacaaacaacgaatggaccacttctattaatggcaggtgcaggtagtggtaagacacgtgtgttaacacatcgtattgcgtatttacttggtgaaaaaggtgtagcaccatggaatgtactagctattaccttcacaaataaagcagctcgtgaaatgcgtgagcgtattgatacacttgtgggaccagaagcagaagatatttggatttcgacgttccactctatgtgtgtacgtattttacgacgcgatatcgatcgtattggtattaatcgtaactttacaatcttagattcaggtgatcagctaactgtagtcaaaaaaattatgaaagagcgcaatgttgatccgaagaaatttgagccgcgctctattttagcgggtattagtaatgcgaaaaatgaactgttatctgcggataaatatgcaaaaaaaattacaatggctgatccatatgaaaaattaacgagcgatgtatacacagagtatcaaaaacgtcttttgaaaaataattcattagactttgatgatttaattatgacgacgattcagctatttgaacgtgttccagaagtattagagttttatcagcgtaagttccaatatattcatgttgatgagtatcaagatacgaacaaagcgcaatatcttcttgttaaacatttggcagcgcgttttaaaaatctttgtgttgtgggtgactctgaccagtctatttatcgctggcgtggtgcagatatttctaacattttgtcattcgaaaaagactatgagaatgcacaagtaattctgttagaacaaaactatcgttcgtcacaaaatattttaaatgcagcgaatgctgttattgaaaaaaatacgaatcgtaagccgaagaaattatggacagacaatcaagttggaagtaaaatctcgtattatcgtgctgcaactgaaaaggacgaagcgtattttgttgcaaaaaaaattcgtgacgatattcaaatggggaaacgaaaatatactgattttgcagtgctatatcgtacgaatgctcagtctcgtatggtcgaggagattttccttaaatctaacattccgtataaaattgtcgggggtacgaagttctacgatcgtaaagagattaaagatattttggcgtacttacgtttaatcggtaatccagatgatgaaattagttttgcacgtattataaatgtgccaaagcgtggcattggtgcgacttctatcgataaaattattaattacggtgtgcaaaatggaatttcattaactgctgtatttgatgagattgagcatgttggagtaagtgcaaaaattacaaaggcagtaaaagaattcgcgaatttattaaataactgggtaaatatgcaagagtatttatctgttacagaattagtagaagaagttattgaaaaaacaggctatcgcgatatgttgaaaaatgaacgttctttagaagcggaaggtcgtttagaaaacttagacgagttcttatctgttacgcaaacatttgaatctcaaagcgaagataagagccttgttgcattcttaacagatttagcacttgttgctgatattgatcgtgtagatgaagacccaactgctggtgaagaagttattttaatgacgatgcactcggcgaaaggattagagttcccggttgtctttattgttggcttagaggaagggatattccctcatactcgttctcttatggaagaggatgaaatgcaagaagaacgtcgtcttgcttatgtaggtattactcgtgcagaagaagagctatatttatctaacgcgcaaatgcgtacattatttggtagaacaagtatgaacgctgcgtctcgatttattacagaaatcccgacagaactagtggaatcattaaatgaaacagcgccgaagcgtgaaacatcgtttggtacaaaaggcagaacggcaagtagcggcaaaacgacaatcacaacagcaacacgctctcgttcagctttcgcgcgccctgcagctaagacgacaggcggcgaacaaattggctgggcagtaggagataaagcttcccaccaaaaatggggagtcggtacagttgtaagtgtaaaaggtgaaggtgatgcaaaagaattagatattgcgttcccaagcccaattggtgttaaacgtttgttagcaaaatttgcgcctgtgacgaaacaataggaaaggaatgaggatatgtcaaaagagatagtaaaaaaacgtatagaagaattacgtgacttgttaaatacatttaactatcaatatcacgtattagacaatccttctgtttctgatgcggaatatgaccgtaatatgcaggagcttataaaattagaagcagagaacccagagtttatgagtgaagattctccctccgttcgcgttggggggactgttcttgatatatttgaaaaagtaacacataagtcaccaatgttaagtttaggaaatgcatttaacgaaggagatttacgtgatttcgacagaagagtacgtcaaggaattgatggtgcgaatgtaagatatatatgtgaattaaaaattgacgggcttgccgtttcgcttcattatgaaaaaggacgcttcattcaaggggcgacacgtggtgatggtgtaacaggtgaagatattactcaaaatttaaaaacgattaaagctatcccacttcgtttaaatgaagaagtaacgttagaagcaagaggcgaagcttatatgccgaagcgttcattcgttaaactaaatgaagaaaaagagcaaaatggagaagatgtatttgcgaatccgcgtaatgcagcagcaggttcaatacgtcaacttgatccgaaaattgcagcgaagcgtaacttatctatgtttgtgtatggtcttgcgaatgtagaagaaaaaacaatttcatcacatagtgaatcgctggatttcttaggtgaacttggatttaagacaaatccaaatcgccgtacatgtgaaacaattgaagaagttatagcttatgtagaagaatggcaagaaaaacgtccgcatcttgattatgagattgatggaatcgttataaaagtagatgatgttgctcttcaagaaagtctaggaactacagcgaagagtccaaggtgggcgattgcttataaatttccggctgaagaagttgtaacgagattaacaggcattgaattaagtgttggccgaacaggggttgtaacaccgactgcagaactagagccagtgagagttgctggtacgattgttcgtcgtgcttctttacataacgaagatttaattcgtgaaaaagacattcgaattggtgactacgttgttgtgaagaaggctggagatattattcctgaagttgtgaacgttatttttgataagcgtactggtgaggaagaagaataccgcatgccaactcattgtccagcatgtgagagtgaacttgttcgtttagaagaagaagtagcacttcgttgtataaatccaacttgtcctgctcaaattcgagaagggttaatccatttcgtttcaagaaatgcaatgaatattgatggacttggagaacgtgtcattacacaactctttgatgctgattacattcgtacatttgctgatttatatgcattgacgaaagagcaattattacagttagaacgttttggtgaaaaatcagcaacaaacttaatacaagcaattgaaaattctaaagaaaactcgttagagcgattattatttggtcttggaattcgccacgttggagcgaaagcagcacgtacatttgcagagcactttgaaacgatggatgagcttgtaaaagcaacggaagaagaactaaaagcaattaatgaaattggcgaaaaaatggctcaatctgttgtgacatattttgataatgaagatgtattagagttattacagcagtttaaagagtatggcgtgaatatgacatacaaaggtataaaaattgcagatttacaaaatgttgaatcttacttcgcaggaaaaacggttgttttaacaggtaagctagaagttatgggacgaagtgaagcgaagaagaagattgaggcattaggtggaaaagtaacaggaagtgttagtaagagtacggatttagttgttgcaggtgaagcagctggttcgaaattagcacaagcggagaaacataatgttgaggtttggaatgaagagaggttcttacaagagctaaataagtaagaggtgcaaacttaccatgaaaaaaatagcattagcggtattaagccttggcctacttgtaagtgggtgtagtgcaggtgccgacaaagatgaaaaagtggctgggaaatcggggaaagcaaaagaacaatcagttgttccaaaatacgctatttcggatgaatattataagacgactattccatttgatggtggaaaggcacgtggtttagtggtgcaagggttaaatagtcgccttgatatagatgaatttgaaacaggattaatgcgaattgcaaaagaatcatttagtacgaaagataattttttaaaaggcggaaaagctctagatactcaaactatacagatgcttgttaaaagaaaacgtacagatgctgaacaaaaggaactagaggaaaaattaaaaaaagatgcagttaaatttccaaatataggattaaatcctgcgttaggaacaggatccgaatcactagaagtgaaaaataaaaaaaatccaatatatatttcaaatattttagagcatgattattatgtgaaaaaaggcgataacggcgaggaacgtgttggtatggtagttggattagcgatgaattctgttcaatattttaacgaagagcatggttacccacgtgaagctgcaatcccagatgaaaagatgttagctgaagggaaaaaaatggcgcaagaaattttgaaagtcatacatcaaaaagaacctgaaacaaaaaatattccgataacatttgcgatttatcgccaagctccaaagtcttcgctcgtgccaggtaattttgtttcttatgcaaatgtcgaaaaaggtagtgaaacggttgaagattggaaacaaattaatgaaaaatattatttgttcccatcagagcaagcgaaaacagataataaacgtgaagatcttgcaagagtatccaactttaaggcaaaactaagcgattatttccaaggcgactatacagctgttattggtactggtatgtatagagatgatgaattaagagaaatgaagcttgatattcctgtccagtttaatggaaaagcggaaatagttggttttacacaatatgtggcagggcttgttatggaatacttcccgaattatatgaaagtacaagtaacgattaaatctgtagaacgcccagaagctattattatacgtgaagcaaaacaagatgaaccacttgtgaaaattttagattaaatatgaaggctgttcctctatggaacagctttttttcttatgtaattttgttataatttaaaatgttgtaaaaaataggggtgaggggtaaagctcatggaagaattaagttttcaagtcattattttattaattgcattcggttttttagcagcttttattgattccgttgttggaggaggagggttaatttcgcttcctgcacttatgtttgttggcctatcgccagcttcggcaattgcaacgaataaattagcggcaacaatggggacgtttacgagtgcgatgtatttcattcgatcaggaaaagttgattttaaaattgtaggaaagttaatcccgttaactattgttggagctgttgcaggtgctttagtagtaaaatttattccatcggatattttacgcccattagtacttgtaatgttggtatttattgctatttatattattgcaaaaaagaattggggaagtgtgtctacctataagaagatgacgcaaagaaaaacattaatatttttctttgctattttaatgataggattttatgatgggttttttggaccagggacagggtcgtttttaatttttgcatttttattaattggcttggattttattcaagcggcagcatctggaaaacttttgaactttgttagtaatattgtatctttaattacttttttattcttagacataattcattttgaatacggtattatcatgggattatcaatgatcttaggtgcttattttggatcgaagtttgcggttcaaaaaggtgttggatatgtaaggactttatttttattagttactatattattgatcgggaaaaatgttttggaatatactcatattttgtagattcatacgcatgtatgaatctcttttttttattatattttaaaaatttattaatttttaaaatataagtctaggaatatttgaataaatctaaattatcgtgtagaataatgttgtaaaatgtaaacgtttttctaaggggaggctaaaaaaaatggtagtagcatacaaacatgagccatttacagatttttcagtggaggctaacaaattagcgtttgaagaaggtttaaagaaagtagaatcttatcttggacaagactatccattaattattgggggagaaaaaatcactacagaagacaaaattgtttctgtaaaccctgcaaataaagaagaacttgttggtcgtgtttcaaaagcaagccgtgagttagctgaaaaagcaatgcaagtagcggatgaaacattccaaacttggagaaaatcaaagccagaaatgcgtgcagacattttattccgtgctgcagcaatcgttcgtcgcagaaaacatgaattctctgctattcttgtaaaagaagcaggtaagccatggaatgaggcagatgctgatacagcagaagcaatcgactttatggaatattatggtcgtcaaatgttaaaattaaaagacggtattccagtagaaagccgtccaattgaatataatcgtttctcttacattccattaggagtaggtgttatcatttctccttggaacttcccattcgcaattatggcaggtatgacaacagctgctttagtttctggtaacacagtattactaaaaccagctagtacaactcctgtagtagcggcgaaatttatggaagtattagaagaagctggcttaccagctggtgtagtaaacttcgttccaggtaacggttctgaagttggtgactacttagtagatcatcctcgtacacgtttcgtaagcttcacgggatctcgtgatgtaggtatccgcatctatgagcgtgcagcgaaagtaaacccaggacaaatttggttaaaacgcgttatcgctgaaatgggcggtaaagacacaatcgttgttgataaagaagcagatcttgaattagcagctaagtctatcgttgcatcagcattcggattctcaggacaaaaatgttctgcatgttctcgtgcagtaatccatgaagatgtatacgatcacgtattaaatcgtgctgttgaattaacaaaagaattaacagttgctaacccagcagtattaggtacaaacatgggtcctgttaatgaccaagctgcatttgataaagtaatgagctatgttgcaattggtaaagaagaaggtagaatcttagcaggtggcgaaggagacgattctaaaggctggttcatccaaccaacaatcgttgctgacgttgcagaagatgctcgcttaatgaaagaagaaatcttcggaccggtagtagcattctgtaaagcgaaagacttcgatcatgcacttgcaattgcaaacaatacggaatacggtttaacaggtgctgttattactaacaaccgtgaccatattgaaaaagcacgcgaagacttccacgttggtaacttatacttcaaccgtggatgtactggtgcaatcgtaggttaccaaccattcggtggctttaacatgtctggtacagactctaaagctggtggacctgattacttagcacttcacatgcaagcaaaaactacttctgaaactttataagaaatagtagaggagctcttcacagaatgtgaagagctccttttaaaattgaaaccccatatattaccgtcgttcgaagagaatgagctaaaacctattaatagcgtgataaacatgtgaacagaaataaaatgatgagaaaagttgacttattagtcatattttttagtattcattttgagaatttcctgtataatacaatttgaaagaaaatctatggttcgacaaggaacactcctttcagttttgctcactgaaaggagtgtttttttatgtagctaaaaattcttgcgtgcttattacatttgcatatacgccatttaaactagctaaaattgtattgtgaatataaacagctggtatagtagcgttcttaaaagaaaggtcttttgtagcacaagcgtcatgtataacggtacattgaaagccaaaatcgaatgtagcccttactgttgcatcgatacacatatgagtcatcatcccgcatacaacgacatgttcaatatttaaacgttttaattgctctagaagattagtttctcggaagctatttggataatgtttgactataactgtttcttctctaagtggacgtacgctttcatgaatatgtacaccttctgtattaggtaggaaaaaagtagcgtcatcttttatagctacgtgttggatatgaaaaataggttcgctgtttgttctaaattgttgtaataactgattagcatattcgcttgcttctactggattacgcaattccatctttccatttggaaaataatcgttttgaatatcgacgagtaaaagagctgttttcatatatttatcttcctccgagtttcatattcaaataaatttattcaattcgtagagaggattctcctgtttaaaaatatgaggaagaagaattttaaataaccttgaaagttactaattttcagatgaatattcatctgaaaattttaataaaggaataattaatatttttctaaaaaatgtattgactcttattattctgagttctataatgagaattaattaaacgacaattaaatcgatacattcttatccagagaggtggagggactggccctacgatacctcagcaacgggtttttttaataccgtgctaactccagcaagccatataaaggcttggaagatgagaagatgtgaacgagtacatataagtgctctccttcttatctttatggttgataagaaggagggcactttttattttacctcgaaagctctgcttcaagtttttacagcatataggagggaaaaaaatgatttcttttaccaatgtaagtaaagtgtatgaatcagctggccaatctgttcatgcggtggaggatgtaacattatcagttgagaaaggcgaaatttttggcattatcggttttagtggcgctggaaagagtacgttattacgcttagtaaatatgttagagagaccgacggcaggaacgatttcaatagatgataaagatattacatcattatcgacgaaagaattgcgtaaactaagacaaagaatcggaatgatttttcaaagttttaatttatttaattcaagaacagtatttggaaatattgcttatccattaaagttagcgaaagtaccaaagaatgagataaaagaaagagtaaatgaactgctgaagtttgtagggttagaagataaagcaaactattatccagagcagctatcaggtgggcaaaagcagcgtgtgggcattgctagagcacttgcgacatcgccagatattcttatatgtgatgaggcaacatcagccttagatccagaaacgacgacagaaattctaaacttattaaagaaagtaaatcgagaatacaatttaacaattcttcttattacacatgaaatgcatgttgtgaaagaaatttgtcaccgtgtagctgtaatggagaaggggaaagttattgaagaaggaaaactgtttgatgttttcacgcaaccaaaaacaaagacgactcaaaactttgtacgttctgtcattaatgatcatttaccggaaagtgttctagcgaaaattcaaaatggtggtcaaatttatcgtctaacatttactggtgaggagacaggacagccggtactatcatatatcgcaaaaaactataacgtcgatgtaaatgtactgtacggaaatattattgaacttcaaaatgtgctatttggaaatcttcttgtagagttgcaaggtgagcagagggaaattcaaaaagcattacaacatctaagactgcaagtgcagctgaaggaggtagaagctcatgcgagttgattggagtatattttggccgcgcatactagatgcgacgggggataccctcttaatggtaattgtaacccttatattcgctacaattctgggtatacctctaggtttacttttatatgtaacgagaaaaggaaactttttagaaaataaatgggtcttttctattcttaacatcataattaatacaattcgtccggtaccattcattatctttttagtagccttaagtccactaacaagaagtgttatcggaacgacgattggaacagcagcggcaattttcccgatgacgttagtcgcatcaattggtattgctagaatggttgaaacaaaccttgtttccgttccgaaaggagtaattgaagcagcgcaagcaatgggcgcctcaccaattagaattgtttttgaaatccttgtaccagaagcgttagcaccattaatcttaggtgtcacatttatgacagttggtttaattgaattctctgcagttgctgggcttgtcggtggtggcggtcttggtgacttggcaatgacatatggttatcaacgttttgatacatcagttatgttcgtaacggtcgtgttacttatcattctcgtacagatagctcaaaatttaggaaactactttgcgaaagtcttgttacgcagatcataaaaaggaagagaggaaaagaaaatgaagaaaattttagcatttgcattatcagcgattgtaggagtctcagcattaagcggctgctcaagtggagacacgggtgcaggagcgaaagaaaaagtagttcgcgtcggtgtaactggaacggatggagacgcttgggaaattttgaagaaaaaagctgaaaaagaagggattaagattaaactggtcgagttctctgattacacaacgccaaataaagcgttagctgatggagatattgaattaaactcattccagcatattgctttcttagagcaatttaaaaaagagcataagttagatattacagctgttggtacaacgcaaattgcgccaatgggtttatactctgaaaaatataagaaagcaaatgaaatcccagatggttcagaaattgcaattccaaacgatccaacgaaccaagcacgggcattaaaacttcttgatgcagctggattattaaagcttaaaaaagactttggtctatttggagatccaagtggtattgctgaaaatccgaagaaattaaaaattacaccggttatcgcacagcaaacacctcgtgtgttaaaagatgtagcggcatcagttattaataacggtgttgctggtcaagctggattagatccagcgaaggatcctattttcttagaagatccaaagaatgaaaatgcaaagccatatattaatatttttgcagctcgtaagaaagataaagatgatccaacattgaaaaaagtaattgaactatatcattcaaaagaagtaacagacgcaattaagaaagaaacaaatgatggttccatttcagtagatctttcacttgatgagcttgaaaaaatcgtaaaataatcattgggtttaatggactaacagaaggaacccctccgctgttagttcgttcaacatataaacttaacaaacaaaccctaattctgtaccttccaattttgtataacatagaatccaatgtttgttaagtagagtgatagaccaggaattttcctggtctttttttatgaatgaaagtagctagcgaacagtaaggtgatccaaattataatgggataagaaaataagctgaaaaggagtgtaattacgaattgctttggatgaattaagtgtttttttgataaaaaaaagaaaatagaaaagagagtaatgaaaaatgctgatattacgccggggttataagagcgataaatgaaaaacaaaataatatgttgaacagagttgaagaagatggccccttgtataaaaataatccagcatatagaagacaagaagttaagttgatatagaaagacgataagtaatacaaagattgttaatacggaaatggcgatgaaaaattgttggctagttataagacggattgaaaattgattagcaaggtattgtggcatttggaaagcttcttcaaggttatgaatgaaaaataataagggaatgatccagaatatagtagtggaatgttttttcatcaatttacatcactccaataaagtatagaaagcctaaaaaaaggccctctatacagagatggttattcaattatgatattttttaaattaacttcatgatgctctcgttctttcagataagcagctagttcctcttgtaaaatatttaatatttgcttagctgattgttggattggattaggtagctcttctaatatatgcatcccgacttttacttttgtacgaattacccttcgtagtaattcctcatgcatgtactacacctccaaaccgaatatttagtacatcttcttcaaattttgctccttgaatagaaaggtgtgttaatgtttttggtaacgtgatgttccgtttaacagaacccgctcgaataataagttcatcacctttttgatttaaggaaagttcacttttgtttgagaagggaatggacagaacgaaaatatactcatcgccatccttttttacatattgagtgcgcccgttaaattttacttctgtaggggaatgatcagttttaaataaagaatctcctacacgttctaacatagacaaaccaacaacttcttgttcaaacattggagcttcgtaaataggaaggggttgaaaactatctttaattaatgttttatatttcttctgtgtatctttccatgcctgaaaataaggatcggtgacagtgttagggatgacgcggttaatcataatggcatctacgttataatcgtataaattcaaataagtaaagctgcgctgggcttctttaatgaccattttttcaggatttacaacgatgcggatacttgttacttctcgatttgataaaatatctctcatttctccgagctgttcaagtgtacttgttaattcgtccataatatcgtcggttggaagagggacaccaaggagtggttgagctacaggacgaacgacttttaaaacttttcttttaataggaaataatttttccatccaccagccgagcatgtctggaaagcttagcattgctaatgtttctcctgtaggggcacaatcaataatgataacatcatatgtgtcttgcttataataatcgagtacgcgaagtaggctaattaaatcttccataccgggaaacatcgttaattcttctgttgtaatatcatcagctgctttagaagtgaagagtagtgtaatatatttctgtaattttccccagcctttttccatttcataaatcgtattaatttcttgtgcccacaaattttcacgaatttctagtggttcagaagatagctttataccaaatgaatctcctaaactatgagcaggatctgtgctcattactaatgtttttaatccttgtttcgcactttgaattgctgttgctgctgaaatgctagtttttcctacgccgcctttacctgtatacaagataattctcatcattcatatcccctttgtttcgaatgtcgaatattacgagtgtcgaagtaaatggttgaataaaaacccagatagggttttattcaatcggaatgtttttcattttaggtgtagaaatcttttcttctgttttttgctgtgacgtagcgatgtgattcatgattttttggaagatttgtagtaagaatgctttttcttcttctgataatgcttctgttactaagctaaagtaatgggccgcattttgttttacttcttgaacgagcattacgccgttttctgttaaccgaattaatacaatacgtcggtcattttcatcacggtagcgttcaatatatcccttttttacaaggcgatttacaacgcccgttgttgtactcatcggtatatcaagaagatcagcaattttcgtcattgtaatatctgtatttcgttccatccaaagtaaacaaaatacttctgttttagaaagtgttaaatctaggcttacccattcttcaggatagaaaagtttcttggcgttatctagcagtaagtctaaaaaatgttcatattgcaacaattaattccactcccgtatatttcgaggttcgtaatatttatttttattttatgtagaatagaaataattgtcaatgattttaattgttttttcagattaggcagaaaactttctttaaaatagtattcttttatgatagatttataaatataaaacgagaatttacataaaaatccatcatggtaaatatacttatctataatgggtatgcagctaacgagggggagaacgatgagaagacgtaatacgcaagcgttcacgtttttagcatggacttcatttgtttgtgcgatttcaggtatgctaattgggatttatacgttagatgaaacgcttagtgtaaaaggatactatttaattggaacattatttttaacgatgtcttgttttgtattacaaaaaacaattcgtgataatgaagaagataacgagagatttccgaaaaataaaccgttagataaagagtaaattgtaaagaaaggcatttgcctttctttttttatgtaaaaatggcgtaagtactctgtgttgacttgcttgaagtactgaaaatttggtatcatcaatagtattgtagattgaacgatatattatggaggtggcctagccgtgtcaagaatttccgttgagaatgtaaagcacgtagcacatttagcacgtcttgcaattactgatcaagaagcagaaaaatttcaaaaacaactagatgcaattgttacatttgcagaacagttaaatgaattagatacaacagatgtaaaaccaacaactcatgtattaactatgaaaaatgttatgcgtgaagatgtaccagaaaaaggtttaccagtcgaagaagtattaaaaaatgcaccggatcacaaagataatcaaatccgtgttccagcagtattagaatagaggaggggaatttcgatgtcattatttgatcattcagtatcagagttacataagaagttaaacaacaaagaaatttccgttacggatttagtagaagaatcttacaaacgtattgcggatgttgaagataacgtaaaagcttttcttacattagatgaagaaaatgcacgcgcaaaagcgaaagaattagatgcaaaaatcggcgctgaagataatggtttattattcggtatgccaattggtgtaaaagataacattgtaactaacggtcttcgtacaacttgtgcgagcaaaatgttagcaaacttcgatccaatttatgatgcgacagttgtgcaaaagctaaaagctgctgacacaattacaatcggtaaattaaacatggacgagttcgcaatgggttcttcaaatgaaaactcaggattctacgctacgaaaaacccatggaacttagattacgttccgggcggatctagtggtggttctgcagcagctgtagcagcaggagaagtactattctctctaggttctgatacgggtggttctatccgtcagccagctgcatattgcggtgttgtaggtttaaaaccaacttatggacgcgtatctcgttacggattagtagcattcgcatcttcacttgaccaaatcggaccgattacacgtacagtagaagacaatgcatacttattacaagctatttcaggtattgaccgcatggatgcaacttctgcaaacgttgaagttggaaactatttagctggtttaacaggcgatgttaaaggtttacgcattgctgtaccgaaagaatacttaggcgaaggtgttggcgaagaagctcgtgagtcagtactagctgctttaaaagtattagaaggtatgggcgcaacttgggaggaagtatcgcttccacactctaaatacgctctagcaacgtattacttactatcttcttctgaagcatctgcgaacctttcacgctttgatggcgtgcgttacggtgttcgttctgataatgtaaataacttattagatctttacaaaaacacacgtagtgaaggtttcggtgatgaagttaaacgtcgtattatgcttggtacatttgcgcttagctctggttactatgatgcatattacaagaaagcacaacaagtacgtacattaattaaaaacgactttgaaaatgtatttgctaactatgatgttattattggaccaacaacgccaactccggcatttaaagtgggcgaaaaagttgatgatccaatgacaatgtatgcaaatgacattttaacaatcccagtaaacttagcgggtgttccagcgatttctgttccatgtggattcggtgctaacaacatgccacttggtctacaaatcattggtaaacacttcgatgaagcgacaatttaccgcgttgcacatgcgtttgagcaagcaacagactatcatacaaaaaaagcaagtctgtaaggaggcgagcatagatgaatttagaaacaattattggtttagaggttcacgttgagttaaaaacaaattcgaaaattttctctgcgagtccaacagaattcggagcggagccaaatacacaaacaagtgtaattgacttaggatacccaggggtacttcctactttaaataaagaagcagttaactttgcaatgaaagctgcaatggcattaaactgtgaaatcgcaacggaaacgaagtttgaccgtaaaaactatttctatccagataacccgaaagcttaccaaatctctcaatttgataagccaattggtgaaaatggttggattgaaatcgaagtagacggtaaaaagaaacgtatcggtattacacgtcttcatttagaagaagatgctggtaaatcaacgcatacagctgatggttcattagtagactacaaccgtcaaggtatgcctttaatcgagatcgtatctgagccagatatgcgtacgccagaagaagcatatgcatacttagagaagttaaaatcaatcattcaatacactggtgtatctgattgtaagatggaagaaggttccttacgttgtgatgcgaacatttcccttcgtccagttggacaagagaagttcggtacaaaagcggaactgaaaaacttaaactcattcacttacgtacaaaaaggtcttgagcatgagcaagtgcgccaagaaaaagaactgttatctggtggcatcatccaacaagaaacacgtcgttatgatgaagcaacaaagaaaacaatcttaatgcgtgtgaaagaaggatctgacgattaccgttacttcccggagccagacttagttgaactttacatcgatgatgagtggaaagaagcagttcgagcttctattccagaacttccagatgcacgtaaagctcgctacgttgcagaattaggcttaccagcttatgatgcacacgtgttaacattaacgaaagagatgtctgatttctttgaagcaactgttgcagacggtgctgatgcgaaattaacatcgaactggttaatgggtgaagtacttgcatacttaaacaaacaacaaaaagaattaaaagacgttgcattaacgcctgctggtttatctaaaatggttcaattaattgaaaaaggtacaatttcttctaaaatcgcgaagaaagtatttaacgaattaattgaaaaaggtggagacccagaagaaatcgttaaagcgaaaggtcttgttcaaatttctgacgagggtacacttcgtaaagttgtaacagaaattcttgataataatgagcaatctatcgaagactttaaaaacggtaaagaccgtgcaattggcttcttagttggtcaaattatgaaagctacaaaaggacaagcaaatccaccacttgttaacaaaatcttacttgaagagattaataagcgataatagtagtgacttttaaagattaagcagaaaaacacccgtacatgggtgtttttctaggttaatcaaacgtttgtttaaatgagacaaaatcgtttaaacaaacgtttgattaactgtcaaaagtggaaaaatgtttgtatagcaactatggtatgatagttgcaaaaaggtgggaataatgataaatctaaacatagaggtttttttcatctcatgaaataatagatagttattattcgttatatgtaaatttttatggaagaatggatagaaataaagtgaaactttaatcagtaggaggttcatccaccattgattattagccctcaccaatcgggcatttactgcccgcaaatagcgggataaattttgaagtcaaataaaaaaccattgaaatgaatatttacttttgatggactacacgaatcgggttcttactgcctgtttgagcgggataaaagaaggatagcaagatgagaggaggtaggcatgggaatactgaatagaagttcagtatgttctttttcgatacataaagaaatttcctgtgctaataaatgatgaagcgagcaagaattatttataatcctacttcggggcgtgagctatttaagaagagcttaccagaagtattacaaaaattagaacaagctggctatgagacatcttgtcatgcgacaacgggtcctggagacgctactgtggcggcgaggcaagctgcggatcgtaagtttgatgttgttattgcggctggtggcgacggtacattaaatgaagtagtaaacggtttagttgggcatgaattccgtccgaaatttggaattattccagttggaacgacaaatgactttgcacgtgcaattggtgtacctcgttctattgaagaggcagcagatattatttgcgaaggaaaaacagtgccattagaccttggtagagcgaacgatacatattttattaacatcgctggtggcggtcgtattacagaattaacatacgaagtaccgagtaagttaaagacagtattaggacaacttgcttattacctaaaaggtatcgagatgttaccatcattgcatccgacatatgttgaaattgagtatgatggaaagttactacaagaagaaattacgatgtttttaattacgaatacccgttcagtaggtggatttgaaaaggtagcaccgtatgcatctattaacgatgggttatttgacctattagtactgaaaaaaggttctatcgctgatttaattaaagcagcaacacaagcacaacgtggtgaacatattaataatccaaaagtgttatatacacaagcgaaccgaattaaagtacattcaccagataaactaatgattaatttagatggtgagtatggtggagatgcaccgatggaattcgaaaatatatatcattgtttagaactatttgttcctgaacatcaagaggatgccctgtaaaggcatcctttttactttgttaaaatgaattgtaaattgggagttagtttgatttttatggtatttttacaattcttttattttacatccatactttattgatacactggaagagataagaaatgagaggtagggtgctatggagaaggtaaaggcgatattatttgataaagatgggacattaatggattttcattcaatatggataaaagtagctgaagaacttgtagctgaatgtataagtttatatcatttaccaagtacaatgcggcagaccttattagaagagattggtgtagagggagcatttgttaatccgaggagtgcaatagctgctggaacaagccttgatgtagcgaaggggctttgtaattatattgagtctgctagagaagaagagatgcatcattgggtaagtgagaagttattttcccttatgtatgagcatcgttcgcatatgaaaatgacagcagatttaccgaaagtgttacaggcattaaaagataaaggatttatattaggggttgtcacggcggatgatttcgcaccaacagaattatttttaaaacaatataagttggagaacttttttgattatattatagcctcggatacattccctgcgcaaaaaccagataaaaagattatagaagtgttttgtgaaaaatttaatttagcatcatgtgaggttgcggttgttggagatacgccaactgatttacatttagccaaaaatggcgattgctatgcaattggggtgctatctggtacgggagaccgtccaacattagaaccacttgctgatttagtgttagattctgttggagagtttatttctcaatcgggtgagtttttctgggagaaagaaaagtctaatgtgtaaggaaaataagtctataaagactcttaatgagtctttatagacttattttttatgcctggatacaaagaatataggataaatgctagaaaagaaagttggcatacattttgcaataaaaagagaaaacaatgtaaagaaaaggatggggtacgcaatgaacacaaaaaaatttgctaaagtaaatgaacaaattccaggaccgaaagcggcatctttattagaacgccgtcaaaatatagtaccaaaaggagtaagtaacggcatcccaacgtttgtacaatctgcaaatggtgctcttgtaacagatgttgatggtaatcagtacattgattttgcaggagcaatcgggacaattaacgtagggcattgtcatccagcggttaaagaagcgctccataaacaagtcgatcaatacattcatactggatttaatgtcatgatgtatgagccatatattgaattagcggaaaagcttgcggcattggcaccaggaagtttcgataagcaagtcctctttttaaatagtggtgcagaagcagttgagaacgcggtgaagatcgctcgtaaatatacgaagagacctggtattatcgcattttctaaaggtttccacgggcgtacattaatgacaatgacgatgacaagtaaagtgaagccatataaatttgggtttggtccctttgctccagaagtatataaagcgccatttccatacgaataccgtcgcccagagggattaacggaagagcaatatgatgattttattattgaagagtttaagaacttcttcatatcggaagtagcaccagaaacaattgcagctgttgtaatggagcctgttcaaggggaaggtggatttatcgtcccaagtaagaaatttgttcaagaagtacgccgcatttgttcagagaacggcatcttatttgtagcggatgaaatacaaacaggctttagtcgtacaggaaaatattttgcaattgatcactataatgtcgttccagatttaattacagtgtctaaatcattaggtgctggtgtaccgataagtggtgtcattggacgtaaagaaattatgaatgagtctgcaccaggtgaacttggtggaacgtatgcaggaagtccattaggatgtgcggctgcattagctgttctcgatgtaatagaaaatgagaaattaaatgatagagcgatagaattaggaaaagtcgtaatgaaccgattcgaagagatgaaaaataaatatcattgcatcggcgatgtgcgtgggttaggtgcaatgtgtgcatttgaggtcgttcaagatcgtaagacgaaagcacctgacaaaacgttaacggctaatctatgtgcagaggcaaataagcgtgggttactgttattatcagcaggaacatatggaaatgttatccgtgtgttaatgcctttagttattacagatgagcaacttgaagaaggtttaacaataattgaagaatcattgcaagcttgttatgagcaaacaaacatcgctcgcgtttaaaaaatgaagtataaatagcaaacattctagctgactctatattaaatgcagaaaattcactttataataaaggtagtgaagtggatcgatggatttgaagttaggggtggctaggatggttgcagaaaaggaacgagtgttaatggatttaaaagatgtatttgaatatgcgtttgacgaaatttttgttacagatgagcaagggatcgttgtgcgtgtaaatagtacatgtgaaaggcactaccaactagctgccgaagagttagttggtaagcatgtaaaagaactacaaaaggatggaatcttttatccatcagcgacattagaagtgattgaaaaaaagaggccaattgaactcgttcaaactacaaaatcaggagagtatttacacgttcgtacaaggcctgtttttgatgatgagggaaatttaagaagagtgattagttattctcgggaccttactgaactctatcaattacgtcaaaaggtagaggaaatggataatcagctaaaaacatataaaaaagaattaagagaaacatatgagcatgaaggacttatttttaaaagtctagctatgcaaaaaatagtcgatacaatcaaaaaagtatctgtagtggatagtactgttctcgttttaggcgagactggagttgggaaaagtcgattagtacgccatttacatgaagtgagtcaccgtaagaatgaaagtttctatgaaattaattgtgcggcattgccaactaatttaattgaatcagagctttttggatattcaggtggatcttttacaggtgcgaatcgtgaagggaaaaagggactattagaatccgcgcataaaggaactctttttttagatgaaatcggtgaaatgccgcttgaaattcaagcgaagcttttgcaagtattgcaagaaaaaacatttcgtcctataggcggaagagaattaaaaaaagtggatgtccgaattgtggcggcaacaaatagagatttaagcgagatggtgaaacaaggaacatttcggaaagatttatactatcgtttgaatgtcattccaattgcaattcccccgcttagggaaagaacagaagatattttgccgcttatttatcattacttgcagcattttaataaaaaatacggacgtgatgtgaaactagcgccgagtacgttacaaatgtttgttggatatccgtgggaaggaaacaatagagaaatagagaatgtaattgagagaattgttattactgtcgatgatgttgtaacggtagaggatttgccactctctatgcaagaggctgcagttgaacaatcggggcaaagcctttataaaatgctggaagaggtagagagaaatattattcttaaagcgtataaaacgtatggatcaagttataaagtagctgagtttttgcaaattagtcaatctgctgctactaggaaaattaagaagttcatagaggaggaagaaaacattggataaaaaggcgactttcgtaagtatagataaaaaggcgatgtatataaatggtgagtggattacactacaagaacaaattgaagtaaataatcctgcgacgaaggaaatatttgcaactgtaccaaagggcggagtaacagaggcaaagcaagctgttgatgctgcacatgaagcttttaaaacgtggtctaagttaacggcagcagatcgtgccacgaagttaaaaaagtggttcatgcttattgataaaaataaagaagaaatcgcagcgattatgacgaaggaacaaggaaagccgtttgcagaagcgcttggtgaagtaaattatgcaaatagttttgttgaatggtatgcagaagaggggaaacgtgtatatggtgaaatgattcctgcttctcatccgaataagcgcattttagttatgaagcaaccagttggcgttatggcagctattacaccttggaacttcccggcagcgatgattacgagaaaggtagcaccagcgcttgcagcaggctgtacagccgttgtgaaaccggcgagtcaaacgccattaactgcattgaaattagctgaattagctcatgaagcagatattccaaagggcgtaatcaatatcgtaacaggtagtgcaaaagcaattgctgatacatggatggaagatagtcgcgttcgaaaagtgtcctttacagggtcaacggaaatcgggaaagagttaatggctagtgctgcacaaacgatgaaaaaagtttcgcttgagttaggtggccacgctccatttatcgtaatgaatgatgcagatttagataaagcagtagaagcggtaattggttcgaaattccgtaacgcaggacaaacgtgtatatgtacaaaccgagtattcgttcaagaagaagtatacgaagtatttgtagagaagttccaaaaggcagtagggcagttgaaagtaggagacggtttcggtgacggaacgactgttgggccacttattgatgagaatgcagtttcaaaagtacaagaacatattgaagatgctattcaaaaaggtggaacagttttatatggtggtcaaaaggtcgcagagttagagggacatttcattcaaccgactgtaattggggtggcaaatgatacgatgctttgtatgaatgaagaaacatttgggccagtggcaccagttgcgaaattcaaaacagttgatgaagtaatcgaacgtgcaaataatacaccatacggtttagctgcgtatattttcacgaaagacattagccaagcattccaaattagtgaagcgttagagtacggtattatcggtctaaacgacggtcttccatcagttgcacaagcaccattcggtggatttaaagaaagtggtatcggccgtgaaggaggccatttcggcatcgaggaatatttagaaattaaatatatttcattgggactataagtagtatactagaatctctataaggtaacagagaaggagattctagtatggtatattggctattattacttgttacaattatttttgaagtagctggaacaattgcgatgaaactatcaaatggtttaacaaagctcgttccaagtgtactgattttcgtgttttatggaatttgtttcagcgtgttcgccatcgttgtgaaaaagatccatttaagtattgcttatgctatttggtctggcgttggaacattacttattacaatcattagtgtgtacttttttaaagagcatattagtttatttcaagcattttgtattctttttattgttttgggtgtcattgggcttaaggtttcatcggcatcatgaaagctatcttttgtagaagatagcttttttctatttgtgcagttagcaattaatacgacaaaatatgacaagaaagcgtaaagcattttgttatgatacatatgaaatattgtcttatgtggaggaaagagtatgttaaaaaggtgagtcaaattgttttaatttttggcatagcttttagtttaagtgcttgcactgagactaaagatagtaatgaaagtaaacaagaagatgttcaagataaagtgtataaaataggggagacagtagacgtagatggtttgcaagtaactatcgattcagttaaattaggatatacggattatgatgaggataaaaagaaagaggagattttggggattattttcaaagtagaaaataatagtaaaaaggaaataccttttgcattttatgaatttgagattaccgataagaaaggtacaagatttaaagaatataataaccctgatagctttattagtaaaaagttagcaccagaagaaaaaattcaagatatcatgctatttgacgtagcgaaagaaaatacgtatatcgctacgtatagaccagagtttacgcgtgaaaatagaacaataaaatttgaattgaaaccaaataaataaagaaacacattggattatccaatgtgtttctttatggtaataaatttaaaacgcccagttacctttacggaagataggctcatgtctgccatcagcagtaataccgtcaatatcaagctcagctgatccaatcatgaagtcgttgtgtgtaatactagcgtttgcgccgttttcagcaagttcttctttagacattgtttttccgccaactaagttaaatgcgtaagcatttccaatcgcaaggtggcaagatgcattttcgtcaaatagtgtattgtagaataaaacatttgtgtttgaaattggtgagtcatgaggtactaaagctacttcccctaagaagtgagaaccttcatctgtttctactaaatgttttaaagcttcttcaccagcttcagctttatagtctacgatacgtccgttttcaaatgttaacgtgaaattatcgataatattacctgcaaatactaacggttttgtactagaaacttggccgtttacacctgttttaagtggcattgtaaatacttcttcagttggaatattagccataaatggtacgttcttttcatttaagctaccagcaccagcccatacatgtttttctggaagttcgattgttaaatctgttccaggacctgtatagtgaagagctttataatgcttttcgtttaagtaatccacttttgtatgtaatgtttcatcatgttctttccatgcttctacaggattttctaaatcagcacgagtagctttgaaaatagcatcccataacttggcttcttgttcttctggcgctacgtcagggaatactttcgcagcccattctttcgtaggaacagaaatgacacaccagcttactttatctgcttgtacgtaatcacggtatactttcattgcttctccagctactttatgagctgttgcgatacgcgatggttctacaccttttaataaatcagggttttctgcatagatagacataaatgcagcgccttcttttgctaattcttcacgagcatgtgctttccaagatggaaattcagcgaaagcttcttcaggagctagatcgaattttaagcgtgttaacgtctcatcattccaatctacatatacgtgttttgcaccagatttatatgctttttctgtaacgaggcgtacaaattgtacagcttcaagaggtgcactaattgataaagtttgtccaggttgaatattaacaccaacattaactgcaagagcagcatatttctctaacgtttgttcaaatgacatatgtataatctcctttaatttgaaagatttcttactatatataatacaagaaaattctaaaaatatatataaatataaagtaaaaagagagctcaaaatgtgttgagcccttatatttacttaattgaagaagcaaactgctctacagtcgttgtatggtgtatacgaacgcgcttcatctttaacaattcatcaggttcacccttcgtaatgaattgcccaggctttgtcgtcgtcgcaaattgataatacttcttcgtttctgcaacaaccttatcatctacatgaccgaatggataagcaatcgcgataacaggcttacctgttattttttctagcttttcttttgaaccttttaactcttcctcatagtttgtaattttcggtaaatctgcatgtgttgcagtatgagattgcaccgagaaaatgccggaatcaaccatttcttttatttcagaagtagacaatgctccttctacatcaacgttatcaacaatcatatattctgttgctgccggtttaaaagtatcatcttttagcttttgtaaaatgcgaaatgcattcatattatttttcataccgtcatcaaatgtaacgaaaatcggtttatttactttatttatatcgccccagcgttcaaacgttaaaagcgtataaccattgtcctttaaatgtttcatttgtgcttcaaagttagctggtgatacgaataagtctttaatgccttgaccatgataatcatcaattgcgtgatacataagaacaggaaccttttgttcgaaagtaatagtagatttcgtaagcgggattgttttcccatcttctttcattcctgttgcttcaatttggaactcaccgcgttttccttcaaattcctttatatcaaaaggaagtgtgaattgtttctctttttctttagaagaaaaagatttagcactttccttgccatcagctgtgcgccaaattttatattgtacttcatttaaagaatcttttatgtctgtaatatgaatacttgtgtttgtagattcgtgtgtaactgaattatatgagattttaccttgttcttgcacagtctcttcttgtttcttaatcccttgagccgttttctcttttttaggttctggacttacattgttagtattacagcctgctagaatggcagacgtacataaagcaattgctgcgtattttctcataaaaatcaccttctattgtgtagtatgttgcatatttatattaaaatccccaccgctataagagtggtggggatatacccttgttcatcatatcatttgaagaaaatgaggggaatatgatttttaggaggttattaatgtaatagattagtgactttgaatagatgtgtttttttgtttcttattagaattaataataatataaccgactacaaagataagaggaataatgaagacatagataggcattccccatacataatagcttttcagggttaagactagtaaatgtaagaaatcgaaaagggcgtgaattttcataaggtcctccaatgttttttacaaattataacatttaatgcttgttatttgtataatttggaaagtaatttaagctaattttaaagtaagaagaagacttattaatatgcaattttgcataaggatatgtattttattaaaatataaagattttatactataatgaaaaccgctataaaactaagtaagaataatgtatggagtggagaatagaaatgaaatataaaaaaataatatatatctttttcatatcgctatttatagttggttgtcaaagtgaagtgagtaaagcaaatagtgtggaagagtatattccatcgcatcttatgaatgcggaagtgacggcggatattatgacacttgaatttccttatgagataaaagagaaattagagaaaatcggaaataaaatgagcgatagtattacaaataatttagattggtatttgaagtatgccgaagaagaaattataccgaaaaaaacgtttccttatcatcaaaacttaggtattacaaaagaagaatatgattttatgatagataaaatggataatgcagaatatataaataccaaagacggaaaactcttttttaaaaagaaagatcatgaaattcaaattctctctgatgaaaatttgaatctaattaaaaatattcgaattgatacagagaagaatacaattaaaactcctttgggagaatgcgaatatgaaggtgaaatcaaggcgtcggatgaacaaaaagctactggtccatggagtgggaagatgtggactttaaaaagtaatggattgctttatcatttttcattaggaaagttaaaaaacataaacaaatctatcatttacatttcaataaaaggtatatataaagataggattatcaatacagaagaagcagttgaatttcactcggtttcataaagaatcaaaaaaatcaccttactcgttaaagtaaggtgattttttattaaataaacaatccagcgattgtcgcagataaaatagaagcaagtgttgatgcaaatagcattttccaaccaaatttagaaacaacgcttccttgtttttcagaaagggcacggattgtaccaacgattgcaccaatttggctaatacttgcgaagctaattaagaatactgtaacgattccaactgtacgtggagctaatgttgtagctgtgtcttttaaatcaaggattgctacaaactcatttaaaacaatcttcgtacccataataccaccagctgggataatatcttgagttggaatacccattaagaatgcgaatggagaaagtacgtaaccgaagatttgttgtaaagtaatggcatgtcccattgcgcctgaagctgcactaattacgtagtttacaacttccatcacaccgataaaggcgatcattaatgcggcaacgataccagctacttttaaaccatcaagcgcaccgttaatcattgcaccgataaagctgtccccgaatagcgttctatcaaatttttgaatcacttcatcttctttcttcgtatcaactggtgttaataacgaacaaacgattaagcttgagaataaatttagcggaagagctgctagtacgtattttgcatctaacatcattacgtatgatgctgtaacagaagcagaaacggagctcatcgcagaacaacaaatgataaacatacggtttttattgaaatgctgtaaatcgtttttaataacgattaatgcttcacttgaaccgaagaatacagagtttactgcgtggaatgactcaacgcgtggtaaaccagtaatttttgaaatagcaccgccgacaacgcgaacgatgaatggtaaaacacctaaataactaaagattgaaagtagtgctgagaaaaatacgataattagtaatacgtttaagaaaaagacaaaatctctgtgaattccattaaagagaaaatcgacacctgtcgtaccaagtttaattagtttgttgaaaactttactaatgaaaataatgatttgttgaccaatctttgtagcaaacataaaccaaccgattaaaatttggaaaccaatcataattgcaattgcacggaagttgattttacttttgttgtttgacaaagcaaaacataaacctaacacggcaagaataccgataatgctcattacatattgcatgtagttgcccctttcagaagttcgtataaagtttgtacataaaacgctcgttatattactaaaaataaaggaatgaggttttatgtcatacgtaagatgtctgaccttttagaaaaataaaaataaaaaaagacccatatggattcactttcatctatgagagaaagctaatcaatatgagtccttttttgcgcataggctaatattcattagttttccccatagtccagcaatttaaggttgctgggtagaaactctcgatccatattatcaagtatatatgaggtaacatcgtccgtattaaattagtagtagcgtaacattaacagagaactatcgtcaatagctttttttcttccaatagaaaaagaccatataagtatgataaaatgtaacgcagtgttatgaaaaagagaggtcggaaaatgagtactaaaatgacgccaccagttgagaaaaacgagtttatagatgtagtatttgaagatttaacacatgatggtgccggtgttgcgaaagtaaagggctatcctattttcgttaaaaacggattaccaggtgaagaagcgcaaattaaaattattaaagtgaagaaaaacttcgcatttggtcgtttaatgaagcttcatacagaaagtccatatcgtaaagatgcagaatgcccagtatataatcagtgcggcggttgtcagcttcagcacttaacttatgaaggacaattacaggcgaaagaaaaacaagtacgtgacgttatgcagcgcattggaggactaggtgatgttcctgttcatcctgtacttggcatgaaaaatccgtgggtatatcgcaataaagcacaagtaccaatcggagaacgtgaaggcggacttgtagctggtttctatcgccaaggaacgcatgacatcattaatatggaatcatgcttaattcaggcagaagaaaacgatacattaatccaagaagtaaaacgtatttgtgaaaagcacggtatcactgcatacaacgaagagcgtaataaaggaacacttcgtcacgtaatggctcgttacggacaagtaacaggggaaattatgcttgtcttcattacacgtacagcagaattaccgaacaaaaaagcaatcattgaagaaattgcagcgaaattcccagaagtaaaatcaatcgttcaaaacgtaaatacgaagcgtacaaacgtaattttcggagacaaaacgacagtactatacggatcagaatatatttatgactttatcggggacattaaatttgcgatttcagcacgttcattctatcaagtaaacccagaacaaacgaaagtgctatacgataaaacgttagaatacgcaaaattaagcggtaacgaaacagtaattgatgcctattgcggaatcggatcaatctcgttattcctagcgcaaaaagcgaaaaaagtgtacggtgttgaaatcgtcccagaagcaattgaagacgcaaaccgaaatgcagcactaaacaacatgacaaacgctgaatttggggtaggagaagcagaagtagtcattccaaaatggtacaaagaaggcgtaattgctgacacaatggtcgtagacccaccgcgtaaaggctgtgacgaagcattactaaacacaatcatcgacatgaagccaaaacgcgtcgtatacgtatcatgtaacccagcaacattagcacgtgatttaaaagtactagaagaaggtggatataaaacacaggaagtacaacctgttgatatgttcccgcatacgactcatgtggagtgtgtggcttggttaaagcttgaaatataggggtttgatattaattgttgatggggttgaccacaaaatgaccacatcaacaatttttttatgattttaacgcctcacttagcgctatagtggcactttcttgcatatctaatgtaacatgactataggtgtccaatgtggtcttaatggaattatgtcctaatcgttcacttacgattttcggattaatacctaatttaagaagaagtgtggcatgagtatgtcgtaagtcatggaatctaattttaggcacttgtgctgtttttataaacctttcaaagacagtagttaatgttcttggatagattggtctaccatcttctctactgaaaactaagtcattatcttcataagctttaccgatagctaatttaaattcattttgttttgctttataactttttaactctttacataagctttgatcaatggaaattaagcgtttagaacccgatgttttcggttctgtatatcgaaatcctaattcatcgtaaattagagtttcagtcacactaaccttaccttcaactaaatctacatttttccactttaagcctagcaattcacctctacgcataccggtattaagcgcaagtaaaaataaatgatagtaaataggattgtcaaatttagcgtatgttaagaaggttttcgtctcctcaattgaccacgtattattgaccacttttcgtgggcgagggatttctacatgttcaaacggatttttatataaaagttcccatttaacagcatcttctaatgcaccttttaaaacgataaaaatatactcaatatatttaggagataattcgtcatcgattagcgatttaacaaatctttgtccatgtagaggttttaaatctttcagtttatgcgaaccaactacaggaataatcctactgttcacagctcttctataattaatgaatgtagaatctctcactcgttgcttagctgtgttttcaagccactcctgtaaatattcactgagagtaagatttttatcatcaactagactcccagtattaaactgatgaataagttcattacatgctctttcggcttctttctttgttttaaagcctgatactgttttttgttttctttttccagtaagaggatctcttccaatatcaattgtaaatgaccatttttcaccgcgttttctaaaatatcctttcattatccatacctccttgaactaatagtattcgaatagcacaaataattccagtattagaaaaaggaaatagacacccattcgagtgtctatgtggtaaaatatatgtatccatacttctgagcccacataatttgtgggctttttttattggtacaaaatcagtattttgttaaatcattatcatttgatgtactattgttcgcttctttaatttgctcagatttgttttttatatcttcagtaatggcaatatcaatattcccttttgcttttttgtattcctgtagtaaagaattaacattttgattaaatgagattaaactaccagttggagagttcacttgctcattaagtgccgttacgatgctatatatctttttatattcatcgtaaagttccttatattgttcaggttgttcttttgcagctttagagataactttcagttgttgtcccatctctgagtacaatagttcagcatgtttaatcattttatcagactctgttttttttgatattatctccacattaaaatcttttctattgttaattgcctcagaccatgtagttgaatagcctgataacacagttgttgagaaccattcaaaagaatcgatgtcgttataaaaattcgcggctgccattagatattcgctttcttttttctgttccagagcaacggccttatgatcattttcgatccccattgtaataaaaataattacgaatagcactacaaaagaaacaatagatgttccgaaagatattgcagatcttacgaataatggttttgtctcattgtttttcttcttattaatgaatcctataattagaaaaactaatgcagctataagcgcaataatactgaaccaggctaaagttcctcctacagcttgtccaaaaacatatcctattccaaattctgagtctccaagcttaatgctattatagagtcctctaataaagagtaggattattatccctatactaattaaaataaacattttattagaaattttcattcttaatcctccaaaaatataaaatgtaagatttctgaagttagcatagcaaacaaaatattaataacttgtcatattatgtcgaatgaacaaataaaaaagagaataaatagctttcttactcaaattgtcattgttgataataattcaatctcttattgtgaaaaaaacagaacaaaggttcgctttttgtggtattatatctataaagtataaaaataacgatatgaaaaattgcatatgtaactaaatcttgatttatagcgataaaaaaactttctcaacatttgattaacaattattttattaaaatttttaaaattcgtgatagtatggaagtaactaaaaatgaacgaaaaaagacccatatgagcgtgttcaagaggtgtctgctaaacgttctcttgaaccgttccctaaccagtacttaggaaacactttgctacatacgagtcacaactaagtataacataaaaaataaatattctcttctcgtattttgtttccaacttttttgaattgttaggtggtgtccgtgttcgggaaaaggaagtgtttctagtgaagagtttaatgaaactaataaaggagcgaataaaaaaagaagaattaacgtttcctgacttagaaagaaaaaccggagtagatcgtgtagtgataaatgatgcgatcactggaaaaacagcagaaatgaaattcgagaattttttgtgtgtggtatctgaaatatacagagatgttaaagaaagaaataagataatcagacaatttattacactatgtaaaaagaatctaaacgttaggaaggctttgtgttattgccaaggaactggagaatatgaagtaatagattatttagttaataaacatagtaattgtaagttgttaaataaatatttgaaagcgtacaaattgtttaataaaagaaatcaggataaaaaacgtggacagcctttattggatgagattaataaaaaggtatttcccaatgatccagaatgccaagtagttattaatattctgtatgcattgtcgatgcatgatatttttaatataagggcaatgaatccatatttagataaggtagagaaaaatttagtagagattaaggatggatttataagaaattggcttagtatgtattttaatgaacgtatggcctatgtgaatttatttgatgataaattagaaatatgtagagagaaatgccgtaaaatattagataacgaaatggaagtcccaataaccaaagcaactgcattgtgctgtatgggagaaagttatatgttcttggatgtattaaaatcagaaaagtatttattggattgcataaagtatttagaggacaatggcataggaagagaaagtcgaaaatataaatcattccaatctactttagcctttctttatatagataatggatttaatcttgataaaataaaatttgaataccttgatacatctgaaataggatatttcgaaggattatatggcgacaaaaataaagcattaaaaatatttaaacagttagctgcagaaagaaaaatggattctccattcacaatgtactatatttccagaattaacaatgatatactgggattaagggaatctttgagacgttttgagcgtgttggtaattatcattatgctaacgcggtgagacgaacgttagctagtatagttgaaagagtgggatgaatatgaaaaaagctagtatggtagtattatctattctgactgtaatgactttaactttaaatgttagtggagcaacaaaggatagtaaaagccaattatctaaacatgaagtacaatatatgatggttgaaccaggtggttcttaaaaattaaaataacaatgaaaaaagagacgttgcgtaaatcgcagcgtctttcgtactttttagggactgtaggttttttattgacggcaaaaaaaccgacacctatttttttccaaacgtcatttttataaagaactaacggttattataatttgctataaagagaaactctaaaaattattaaattacaaacaaaatatacagagggtgtagggggaaattataatggtaaaagagcaagtagcaaaagaagcggcaattaagttgttattagagggaaacactcccaatactgaggaacaattagaacacttactagacggtttatttaaaataaaaaaagactaaccacagaggttagctttttttatttttgttctttgttttgttgatattgtacatacatttctaattgttcccaagcttttttctgttcttcttctgataatttagagatcagttgttcaatctttttccccattgcggttgcttgtttatcctgttctgcggttaatctttcgtcagtggatcttcctaatagaaaatctacagatactttataaatatcagctagtttagataaagtatcataatctggttttcgtctcccggattcgtaactagaaagagtcccacggtgtatttctagtttttcagttatatacgtttgtgtatagccgcttttttcacgacaggctctcaatctttctcctagagtcataaatttattcccctttataaataaatttctatgtgtgagttacattacattcgaattgttgttaattacagtatatatactttctgacgactttacactgttttttatcaatttgataaaaaaaatataacaaaatgacaaaaaacatgtttacttcttcagaatgacgacatataatgaaaataacaaatcgtcaaaacgacgacttggaggtgaaacatttgtctataggcatgagaatacgtcatatacgtaaagaaaagaaaataactcaaggagaattagcaagaatgcttggctttagcggttcttcagctatttcttatatcgaaaatggtcagcgtaaactaaacgccgataaaatacccaaattagctgaaagtctaggcgtaactattgaagaaatttttttgaatgaaagtcgtcaaaatgacgacaaagagggagaggatgaagaatcatgagaaattcaacagttcaaatagcattatcacttacaaagttttcagcccaaaagggatggagggatgaagaattttgggaggctattgagttacttcgcttcaataaagaagatgaaagacaaacaactgtagaaaagttagatagcattccagtcactaatgatagcgcgaacgattatccgcttatgttaaacgtaaaacacgtagaagaaatattaggagtagcgaaaagaacagcttacggcattatggatcaaaagggttttcctttagtgaaaattgggagaaagaaagtagttcccagggatgcattctttaattggatagaaaagggggtgtcagcatgatggaagatacaacatcgctagctttattcgcaatgtttatcgcatgcagtgcgtggtcgctttacattacttacgagccgataaaacgttgggcttggagtgatgtagaacaaaataaaaagacccatagcagtgggtcctttaagaaaaacaagttgttataagtataccacggaaagtagggaaatagtatatgaattcaatcgaatatcaagtgctattacctaataagttttgggacttagcagatagtcaagatcaattaaagaagatgattgatcagtatttcaaggttggttatccgcattatgaaattcaacgaattatcaaaagtgggcaagcatatgtggcagtttgtacgaggaggtaaataaatggcaacgtttcgagttaataaaagtaaaaattacacaaccattaataatacaggtcttcgtgacgaacgtttaagttggaaagcgaaaggaatattggcttatattttatcattaccagatgagtgggtattttacatggaagaaatagcgacacacgcgaaggataaaattagtagcttatattcaggaatgaaggaacttaaaaagtacggttatgtaaaaaggttccctgtaaaagatgaaaaaggaaaaattattaaatgggaaacaatcgtttatgaagtgccacaagaggaaaacccatatgtagaaaatccacaaatggacattccacatgtggagaatccatatatagaaaatcaaacactactaagtactaataatttactaagtactaataaacaaaatactaatatacaaagtagtagtagcatcttctctttttacgaaaataatttcggcattttaaattcattcatagccgaaagtatttcacaatgggtaaacgatacaagcgaagaacttgtacaagcagctatggagcgtgctttgaaacagcagaagaaatggaattatgctgagggcattttaaaacagtgggttaataaaaatattcgtactttagctgatgttaatgcagcagaaatagagtttaaaaacaaaggtaaaaaaggagagaaaaacaatgcaagcgttaggaaaaacagtagcttcatcgaaaaatacgattttgagtaaatttgctcaaagttatgtgttgtctcctaatagatgtacaaatgttttcttggtcggtaaagacaaaattaaagacgtttgtaataaacgcttacttatagatacaaaaacaaatgaagagttttgtccacaatgtagatcggtagagcaagaggaccagcaacttgcaaaagaaacattggctattaaaaagaaaaacgaaattattcatttatacgattcgttttcagataacagccttattaatcctaaattgaaaaaagcaacatttgatagttacgcaccacctacacaggaattagcaaatgctaaagaagtaatgatggattttgctagaaactttgaacctaacaagtcagaaagcattgtaattacgggtgactatagagttggaaagagtcatttatgtgtagcggctacaaaagaaattatgagaaaaggctatagcgcaatgtttatagaaatgaacgctctcttcacaaaaataacatctacctggaataaaaatagcgagttaacagaggacaagctaatgtctattctcgcaaatgtggatgtacttgtattagatgattttggagccgagtttacggaaaaagatgctgagggagttacttggaagaaaacgaaaaccaaggacattctagagcgtaggctaggcagaacaaacttatttacaacaaactttggagttatggagttagcaggaatgtacggagagcgtgagtttagtcggattatggaagatactcaagtgttgaaaatgaacggtgaaaattacagtttgcgaaacttcaaaaaggaggaataagcatgtgtgtattatgtcgtgataaaggaattattcgtaaagaaatttatccaggtgtagctctaacggaagggtgtaactgtgaggtagcaaagcagcagcaagaagaaaacgataagcgttggcaagcatggttaatcaaatttgaatcaatgaaacaagagttgaaacggaatcaacaacaaaaagttagctaaaaagggggagaaagttatgaaaaacacaggtgtttcaagaaaagtggacgagctagggcgtgtggtaattccagtagagttacgcagaaatttaggaattgttgaaggtacagcattaggatttcatgttgaaggggaaaacatcgttttaaaaaaacaggataagtcatgctttgtaacgggtgaagtttctgaatcaaacatagagttgctagagggtcggatgtttttaagtaaggaaggtgcaagtgagttgctgggcgctattgagaagagtgggattgtaaatgcctaaacaattaaatattttcgatgtagaaccggaaatttgtcagttcgatgtaatgaaggccaatgttaagaaaggaactggacgcaatacatacgctgatgtacgcgtccaagttccaagaaatgcaaagggtacggatgaattaccacgcacaactaaacaagatgatcgttatgacatctttgaacaatatgtaatggcaatttggagatttcaaagggctgtagataagtttttcaattgggatacggctgaagaattgtgtaaggcagcaagggataaaaaagaaataattccggtaaggatttacttaggaagtggattcaaacctgatgttgtcgagtacatgcggtagtaaaagggagagggacatatgaaaaaaatagaaattgatgttagcagcaacaaactttatatagtcaaggacgggaatgttacggcagttaacccgccaatcagtggatttggtgagcaagtcgcagtatgggttaacggtaaagtggatcgagtggatactaagtttactgaaaagataaaataatcatttttagaaagtaggttcgcttatgagcgtagcaagtaatcatgaagcgatgaaggaatcaagattaaaaatttacatcgctttagaggaagctaactttatttgggatgaaagagatgtaattcgttttcgtgaaatgtggaaacaaggtatgagcttgccaaagatggcaaaagcgttaaggaggcaccaagcggaggttgcgctccttgtgatagaccaagctgatcaggaattaataacaaatcgtccgataggattaggaatttgctaaataggaaggggaaatcaaaatgaacttaactaaaatattcggaatgcaaaaggtattagatacaagaatcattaaggagcatggattggaaggacaaaatttattttacaatatgatccttgctttacaggtggaaattggagaacttgcaaatgaaacaagatgctttaagcattggagcaataaaggacctagtgaaaaagaagttattttaatggagtatgtagatggatttcattttatagcttcactagggaatggcatcggatttaatcctaatgaatatagcctgaaattattagaacataatgcaaacgtctatacggcaagtacgttagtcaatcaatttaacaatgtatatgaaggtatatcggaatttcgtgcaactcaagatattgagctttatgaagaattattgtactcgtttttagggttaggtaagaaattaggattcacatttgaagaaattgaacaaggttattacaaaaagaatgaagtgaaccaccagcgccaggataacggatattaagacaaaatttgaattttattagaaaaggagaatgagagatatgccaaattggtgtgaaggtacttttaaagttagaggagcaaaagaggatgttagaaagtttttattggaagcactaactcctattccaaacggattctttgaacaaacgcctgtggaaaagatcgtagaggaagatgagtatgaaatcttcatcaagtcagaaaatgcttttcatattaaaggaacacgtcggaattttatagagagtaacattcaacattattttgaagatgatgaagataaattagaaatatgcgtactggaagattataaggcggcttggggcatagatgcagcaccattagcaaccttgtctaaagagtacaacgtggatataaaaatttatgcgtttgagaaagggatggaattcaaccaagatgttgagattcataaaggcgagattattaagaacgtagagattgaatttgataattatatgtgggaatgcatcaatcctaatatgggcggatgagaatcaaacaaaagcgttattttaatcgaaaaggggaattagagatggcatacacaatcgttaaatacgatatggaactatggttcgatgagaataaagaagcggaagttataaaagtagtagattgtgatttggcgataagcactaacattatgatagatggtaaagtttatcacgtttgcgcaaaatacccaaaaaataatttgatcggtgttagagaaatacaattacagtctaaaccagaagatgtcgaatatgaagaacatttaacatgcccttattgtggcgagaaggatgtagatgcctgggagcgttcgcaagacaatgacaaaattgattgtagtatgtgcggttctgaaattgagtattcaagagaagttgagattacatattcgactaaacctatcaaaagaaacaatcctataaagctttaaccaaagcattattttaatcgaaaaggtggatagatatggcatacaatcacgctctatacacgttaaataaagagaaaaagagattggaagataaaatcgaggatatagaagatcacgttttatatcctactaataccgaacgcatgagaagatcgatgataaaaatgttcgaagagcaattgaaaagtgtaaacgatggaataaaaaaactgggggaatcgggaaatgaataaggacattcaatttttaaaggaattgcagcaggaattaaaaacacaggaaatcgattgccaagcatcaccacgcttttggactttaatggattataaatgggttgtaactgcagaagggtaccacgaaagaacatcattatactttgttaacgattgtgaagctgtaattgtcgatgaatacgtaaaagaaattattaacgatgaaattgaacatgaacttactgaagaacagattgaagacttaaaagaattgcaagaatacgcttctgaatacgacctagttgagtggattaaagaaaacatcgatgaagattgccatttagtatacgaaaaggaagaagcattcattgttgaaaatacgatgttcttaactaaagcggaagctaagaagcacatagagttaaacaaacatcattacacaagcaaggtccacacatacgctatgacggcatggcgggcgccaaaagtggaacgattgttgaatatattagaaacatttgattgggagtcaattagtacaaaatagttattttaacacgaaagggagaatgagagatggaatggatgtacaaccttactggcaatgaaatttggacaagtgatcgctttgctactaaagaagaggcgattgaggcagcgaaggaagaaatgaatgaacttgaaaaatatgatggagttccttatggagataacttttcaatcggacagataagtgattatgtgccatatgttagtgcagaagatgttattgatcaagttactgtaaatgcgtatgaggcatgtggagaagtttcagaaagctggttatctaaacctagccaagatgaaatagacctacttcagaaaaagttagattcaaaaatcagcgaatggctaaaagaaattaaggaatatcctacatttggccagatagttaatatcgaagtagttaatcgttaatttataacaaaattcttattttaaacgagaggggaaaataataatgagatattttgagtttgataaacatgattattacgctttgatggcagttaaagatggtggggaagaaaaagcaatcgagctatatgttgaaattgtagctggggaaagcatcaaggaagtagaggaagaaggtttaccagtagagatcacgcgtgaacaggcactatcaaagtatttagatgtaatgggtagggatgatatttcagaatggattaaaatgtttgatcaatgcgaaaaccttccgttgttaattgatggaacattagtttaaacaaaatttcttaattaatcgaaaaggaggtggcaataagtgaaatttttagttttaaaattcgatgatattttaaaaatgacatccgcgaacgaaagggatattttagaggggatttcacgaaagatagagtgcgaaagggagaaacaagggcgtaacccacaacctaaatattatgtggttaatcaagacgagccgtatgcagaggaagttctaaacattataaaaaagcacgaaggtgaaatataacaaaatctttatttgatagggggagacaaaatgggctgggagaaagtaattgagcaaaaggaaatgacaacaatcgaaaaactacacctgatatgtgacgctagtttagtacaagggaagagcatagtagttgaagcgaacagttttgcttggatgattcggactattaaggaacttagtaaggagggaaacaagtgatttatgaagtcatagattattgctctagatgtgatgagaaattagaaaactgtgagtgtgaatgcaggaagtgtgatgagtggttacacgattgtaaatgtgaagagaccaaataaattcgttatttgaaaggataaaacaatatggatcatacacttacagatattaaagatgctatttttttcatcgaaaaagatggtaagccgatgaaagtggcggaagtaaagggtgttgagtttaattttaagttcgaaagcaagcatagtgtagaaatcccgcaaaaaacaagtttcagttttgaatccgagctaccagatatagtaaaggaattaatgggtatgggatttactccgcagcaagcatggaatattcattttcgccaaaggagtaaatggaaagcacttcaagaagagttaacaaatgaattagatatgatgcaattgcttgataaggtaattggtcgtgttgaggaattagagtgtttattagaagaaattaaatgctatgaagcttattgctggggtaatgatcggaattttattgatgccagaattaagcaagctttttcataaaatcgtaatttggttagaggtgaataatcataggctactatgaaatgggattagaaattgctgcaatttggttgtcttttgatatgcaaagcggggaaataacagataactatagagataatgttcattgtaagaatctaaatgaacaggagttgaagtgggtagttaatagagcgaaagaacagttggaaaaagataaaaactgaacaaaaacgctattttattagaaaaggagaatgaatgatgaaaacatttactgtaacgtatacggaaactaaggtgtatgagggaattgtagaagcggaaacattagaacaagcagctgatcgcgttcgtgatggatatgtcgaagaagaggtgctagttgaaaaagacataactatcgatgagctaaaactggaacaaacggaagaaccggataacgttcgaagtttggttataaattacggagaacttagttttacgaattttgaacatgctgtaaatgttctttcagaggagtatggatttgaaggtgaagcatgggaaatggttgtagcgagtggagacttagaaatattatgtgagtttctaagcgaagatggtataagtgcagaaatcgaataaaaacttcattttagtagaaaaggagaatgaaagatggaaattacggttaatgaaacgggatttaatgaagaaagaatgagaaaaggtaaagtaacgattgttacaaaagctaatacatttacgatccatacagattatgtagatgatgcttattatctagctagcgtactagaagatgtagcagaggaaattgaagttaaagaaaactgaacaaaaatttcattttgtagaaaaggagaatggatatggatataggtatgaatgaccaaactgtaatcgttagtattccaccagtagaaaagtggccgttaaaacaacttaaatcagtttgtagacataacaaaataaaaggttacacaaaaatggatcgtgaagagttagtgcaacatgtaaaagaaataatcaagagcatgaagcctattaaagagggggaattgatatgaaatactttgagtttgataaacatggatattgggcaatggttgcagcagaggatgaagataaagctatcgaggtttatgtagaagaagttgctggagaaagcattaaggaaatagaagaagagggagaacctacagaaataacaagagagcaagcattaaacagatatattgaatcgtcaatttcagtagcaggatatttaacgattgaagaaataacaaaagaatttaatgagcgtaagaatacaacattactaattgattcgtcactaacataaaagagcagctagcaaaagctaactgctcatctccaagggggaacaaggagaaagtaacttaatgggttgtctacagtattgacggaatattgagttttattcaggggaggaacaagaaaatgagaaaaattaaatgtcgtggaagagatgaaagagggaagtggcattatggttattatgttgatggttatatgtttgatggcatgctaggtctttgggagtcagttccatttatagtccaaagccaattagagggtgatgttcgagttgaagctgaaacagttggtcaatatacaggcgtagaagataagaacggcaaggcaatttacgaaggtgatattgtcaaatgtcataacgatttagtctacagagttgattggcacgaaaaggacgctatgttttactacaaagatccagatggagatgaggatgaagatttgagaatgagtgcagtgtcattcgaagtaataggaaatgtatatgacaatcaaaacttaataaaataatccttttaaagtaaagcaaacagaatatagtccggctagaaaactagaggacaccaattcattaaagcagtaattaaagctgttttaggaataggtgtcctctttattttgaaaagggagatggggaaatgaaggggttaagagatcaattgcgtgaatggaaaaagcaaacaaataaagcaaagaagaaaaagaagaaaaaacgaaaagagaaatttagcactcgtgatattgaagatttaatgggcatgcatagaccttgttatgaacgaagacgtggagcaataagacaaaagtaatctaaaaataaaaaggagtggtcttacatgactaaacaattatctttcttaccaaaaatcgatagaacagcgacacaagaggaattagaaggtgtgttggaaagcgtacgtatacatagacaatttgggatgatgcgtaaagaaatgaaagtcactccttcttatgaaatacgtgagcatggtcctacacatacagttggaaaaccattagaagatgttgctttagcaaatattcaacaaagtaaacgagaagagtggcttgaaagaatgtcagtacgtatcgatcagtttctaaatcgattaggaaatggacgtgctggaagtatccaaagagatattatttataaacgttatttagaagaagaggacgtatgtgattacatggtttataacgaaatagggatgtcagagcgtacttatcgccgttggaagtctaaagcattttataagcttgcttttgcacttggattagaagtttacgagacagaagaaacgggaggtaatgaataatgaattttgttcaaccgatacgtgatccggagcaaatacagcagctaaaagattattttaaggaaaagagcttacgtaattacattctcttcattatgggaattaatacaggcctgagaatctcggacattttgaaattgaaggtaggagatgtcaaaggtagtcatatatctatgagagaaaagaaaacagggaaacagaaacgaatacaaattactgcagcactgaaaagagaacttaaatggtttattgaagaaagagaagataatgagtatttattgcaaagtagacaaggtaaaaatcgtccaattggtcgtagtatggcatataagatattaagcggagcagcggcagagtttgggctagatgaaataggaacacatacactgagaaagacgtacgggtatcatatgtacatgcaaacgaaaaacatagcattacttatggagatattcaatcactcgtcagagaaggtcacgttacgttatataggtgtaaaccaagatgcaatggataaagcaatgactagatttaaaatctaagcattgcttttctttttaaatctatacagttactcataaatttcgtactgtgtaactcaaaagagaaagtgaaacaaaatcaatgatatcaaggggtttggcgaaggggtcagttacacacaatacaagatatgggtaagtcattagaggaaaaacaggaggagtaagtagttgccaaaaactactgatttgggtaaaacagttgcaaagagtaggtcaggatattgatagggaaaaataagtggcagagtcgtgaccgctttttggcaggaaatgtgccggttgttttggaatttacgtgatatatttgtattgtgagaagtggcggaaaacacaactcataaagattcctttataatttatatgttgtttaaacgattccgtaatggtagcaaattaaatccgaaaccagcagatggtaacgattgaatgataccattattaaggagagcttttgctcttctttgagctaacaacatcctaggtagacagaattaggataacctgataagttttccgatggtgtctgtcgtggttgttagctgaaagaagaataaaacttcacataccgtaatcaaaatgcaaatcaataaatgataacaaagcatccattcgggtgctttttattttggaggaggatgagggatggataatcaatatcttgcggaaagaatcaatcaattagaaaaaacagttaatgatttagatagtgtgaatcgagatcaacaaaaagtgattaacgaattatctatgagaattgaaggtgtaatcaacacgattgatcatttaaaaaaggaattaagcgctaaaatgaacgatcttcccaaagatgcgcaagaaaagatagagcgattaaagaaagccgcggagggaattgtagatggctaataataaattaaagattaatatagatactgaaactaatacatctgaagcgttaaaacaaatgaaggaagtaactgaagttgctaatgaatgtgtggccgcattagagaagttggaaaaggttattggtaggtttactaataataatgattcgattgaaatagaagttcctctctttctaaatggaaagcaaatagctgaagctattactaaggttgaaccgtctgggaaatctcagattgcacttgctaaggagaaagagttacaggatcattatgaatgcgaatggtgtcataaagataaagctatccatattatcaaagaccttcgttatggtgaagaaagaaagatatgtacgtcttgctatctatctattgctcagaaggtagtgtctaacaatatggcagataaaatgcggaagaatatatgatgttgtggttattaggttatttaattgtaggtatgatatatgtttcttttggtatgcaaccagctttacgtaagatgttaaaagaagaagagggtgatactaaacaagaagcaattactattgtagtaatgctcttagtcattggaatcttcacacctgtttggccagcgttagtaaccatgaagattgctggtgtgttttataaaaacaaatataaggagtgaggaggtgaatacattcttacacaatgtaatcggtgtaaatgaagctgcatctattctcaatgtatcatctggtcatgttaagaacttatgcgctgaaggaaagattgttgcaaagaagataggtaagacatgggtgattgataaatcgagattaagaggagtgagataaggatgaaagtagtaattaacaacattggctttgaaacaatagatgtacttacaaacaattccacgaaggtttttagtcagatagaaacagtatttgtaaggtacactgtggttaaaggtaaacatgaattgtcaggtgtaacaagtctcgaatttagtgaatataaacacttccactacaacaaccttatcgatcatattataaatggattgattgtggatagtaatcatgttactgaagatatgtaagtgtggtaagacagtaccgatggaacaaggtatgtgcgaggagtgtgctgttgttactgaagaaagaaggaaacaaaggcacagagattacaaggcgaagcgaacggatacggacaaccagaagttctataactcaaagccttggcgagtaactagagcaagggtaaaggatagagacaatgggttgtgtcaactatgttggagtgagaacaaggttaaaccaatgaacacagtacatcatattattcctttagaagaaaataatcgattagctttagtaagaagtaatttgatttcattgtgtgagaaatgccaccagaaagtccataagctgtatgacgttaggacagagaagttcaatatacagaagaagttaagaagtttgatagggtagggggatatcaaaaacttttcaaggagggcgacgagtcgccgggtggtcttttttttcgcgaaaactccctaaatgaaaattccgaaaggaggaaggtggatggctagaccgagagaacctgtggatttagttgtactcaaaggaaaaaaacatttaacaaaagctgaaattgcaaatcgtaaatcaaaagaaatcaaggcgcctagtgataagattagggcgccttcttatttaccaaaagatttgagaagagactttaaaaaaatatccgatgagctaatcagaattgaaatcatgtccaatcttgatgttgatgctttagcaagatttttaatagcaaggaaaatgtatgtagaaattacaaatgctatgcttgagcttagtccgttagaagaagtggtggatgtaaaaaaggatcaggaaggtaacatcatatctgagaataggtataccgtatctaacggcgtgtattcagacttacttataaatcaagacaaactttttaaacaatgtagacaagcttccagcgatttaggtttaacaattacatcaagatgcagattagtagttccaaaacagaacgatgaaaaacctcaaaataaatttaataagtttatgtaggtaagttgtatgaatagggtcacacagtatgctcttgatgtattagaaggtcgagaaattgcagggaagtacgttaagttagcttgccaaaggcacttagatgatttggaaaaaagtaagttggcgccgttcgtctattattttgatgaggaaaaggcagatcggttacttgagtatgctgaaactttaatgataggtgaaggagaagaagtagaaccacttactttagcatcattccaagcatttatttttggatcattacatggttgggtccataaagaaacgggttatcgtagatttagaagtagttatgttcaagtgggcagacaaaatggtaaatctatgatgaatggtgtattagggacatattatagcaattttgatggctataattatgcgcaagtatactgtacagctacaaaacaggatcaagcaaacatagttctcaaagaaatgattaagttcattgaaacagatgaagatttaagtgagtgtttcaaggtgaaagaatataaaaataccattgaagcacttgtaacaaatggagttgtccgtgctctgggaagagatacggagagtatagatggatttcgcgcttaccttggcattgtggatgaataccataaacaccctacaaatcaaatgtataaattattggagggtggaacaactaaattaaaagaatgcttaatatcagttatcacaacagcaggatttgatttaaacagtccttgctacgagttgtatgaagattgttgtagacttcttgaaggtgtatatgaagacgataaacagtttgtatatattgctcaattagataaagatgatgatatttgggattcaagtaattggataaaagctaatcctttagtagcaagagatcaagaaggaatagaaacacttttaactatggcaagtgcagcaaaacgtaggggcggaagtgaacttcgcaatttccttacaaagcacttaaatatttgggtacaattcacagacaatcaatatatgaacatggaacattggaaaaaatgtgcttcagatttagatttagaggattttagagggaaagagtgttatttaggtctggatttatctagcggtggtgatttaacgagtttaggggcagtattcccatatttaaaagaagaagtgaaaaattatttcgtacattctcatagttttattcctaaaaatcgtgtaaaagaacatatagagactgataaagctccttatgacatctggattagagatgggttattaactgttacagagacattagggggtattaaaacagattataaatatataatcgcttatataaaaagaattgtagaagagtacgagttaattgtaaatataatagcatacgatccccacaatgcagatgcctttttgaatgatcttgaagagcttggatataacagcatcatgattgtccaatcagcaaagaatttaaatgatgctacagtcgattttagactagaggttgaggctaaaaacattcaatataatcgtaaaaataaattgttaacatggagtatagccaacgcaaagacagtatccaatagtttcggtgaaatcaagatcgataaacacttaaaagagaaaagaattgatccaattgatgcggttattgatgcatataagatggcaatgaagggagaagtaggattgaaattaagccaatatgttacggatgaaaatctagataaacttggttggtaaaggaggtgagtgaatgtgggaatggctcaataaattaaaacctaagaaggttcaaaactcagtatcacttgattcggacgagtttttaaagatgttaggtattgatataggtagtgtaaataaaaataaattaagtgaaatcacatattttacctgtttaaggcttttatctgaaagtattgggaaattacctttaaaattatatagagatacaaataacggtcttgaaaaagcaacagatcataatttgtatacacttttaaaaatgcggcctaatccatatatgacttcaagtacattttggtctacagtagaagcaaataaaaatcattatgggaatgcgtatgtctatgttaatacggagagggataaagtaaaagatttgtggattcttcctagcgaacacgtacagatttggattgataatgcaggtatattccaaagggaaaatgcgatttggtatatatggggagataataaatctggtaaacaatataggtttcgatatgatcaggttatgcattttaaaacttcattatctttagatggtatatctggtttagcagtaaaagacatattgaaggtatcaattgagaacatacaaagtggagctttatatctcaataactatttttcaaatggtttaatgggaaaggcagttgtccagtatactggtgatttggatcatgacaaagcaaagaaaatggtagcaaaaattgaagaatttagtaatggtttgaaaaatgcaggaagaattgtcccgctaccattaggttttcaactcactccattaaatgtgaacatggcagatgctcaattcttagagattaacaaatatacagcactacaggttgctggggcatttggtattaaacctgcacaagtaaataattatgataagggtaactatgcaaatgttgaaacgcaacagcgttctttttacgtagatacccttttatatattttgaaaaattacgaggaagaaatgagttataagcttcttcttagtgatgaatttcaaaatggatattgctttaaatttaatgtgaatggtattttacgtgctgatttcgcaatacagatggaaggcctatcaaagggtgtaaacaatgctatttatactccaaatgaggcaagagaatttgtagatttgccgcgtaaagatggcggggattcattaatgtgtaatggaaactatgttccattagtatcagttgagaaagaccaactatgagaagtcaaggggagttttttatataaatagggggtgttttaaataccctatagaatagacttttttcaagtgtctattctatagggtacattttattttgtacagctacctttttcatatggtgaatttttaatagatattctatcagccataagttacattcttcatatttgagcttctttgaattcaataatacttaatcagcttgtcttattacttcacttaacgtaacgagattcatcttatagcaactacaacacgctttattattaataatactactcttcttattttaactttaattccattgccttgattttttaataataaatatacaacttagtaatgataatagatatacaataagaataatatacaactgttttggttcaatgctatcgatataaagactcataattggatatgaccaaggaaacagtatccaatagtttgtatgagagataaaaaaactacccagtccacctataacccctactaataatgaaagtaacgggattttataaaatattatatttattaaaaaatgtagattcacaatagttaaagagctaatcaccataaaaagtatagaaaaaattaacctttgataaacagtcccaagattatcagccgttaatactataggtatactagttatgactaaagcacatattaaataaccaaaggtaatcattaagcaaaacaaaaacttattacttaatatagtttttaaagtgattccatgataaatagcagacatatatccttttcttctgaattcgtttacaaaagaaaatgacactaatagacctattgcaataggtaaaaataatctacaaaaaagacttagaatcgctatatgcatgaaaacgccatcttttgattgagatgatacagttagaaagatttgaaaactaattggtatcaacagaaatactagtaacaggatatacaatccattatgaagactttttttatattcacctaatatacccacttatttcaccctttattattcatatgtataatatttaaaactcacagctaataacataattcctaaaatatagattgaagaacttgcaagatatattaaaatagttgtttctttcatcattacatcacttactatattcaatgcataaaatattggaaatgtctttgtgaatactacaggaaataatccataagttacgctaaaaaaaatccaaataactgacaaggacgccgcaagaattcccttttttataattaaatgaaaaagcaattgagaatatggtattgctaaagataaaatggtacaaagtaacaacatttttaaaaaatacagtatagatatttcatatccatttataaaaatatagacacccataactgaaaaatttaaaatattaaagattaaataaaacagtataaacaataaatttttagctaccaataacttgaattttgaaatgggttttgtataaataatagcccaagtaccatatttattttcagaagaaatgataaaataccacatacaagcagaaaaaatgcttaatgttagtgtattaaagtttactgtaattgctataagattggtagattgaaacatatcgggattattcttgttaaaaataaaataacttatacacaaaaagcttgataataatgaaaaaaacaaagaaaataacaataattttctcccaccaattttcctcatctcactattcacacttttaaagataaattgcattatgatagtaactccttttgtttagttaaagataaaaatacttcctctaatgttagctttttagggctaacttcaaaaatatctatatcattttcaattaatattctggttaaattaggaacactattttgatctatcattagtttgaataccccttctttttctatgctataaggtatatcctttgtatttaaaatcctttctgtggcagtagtgtcattaacatgaacaatatattctctagaagtaataatactgtttaaattcccttcatagagtaagttacccttatgtagtaatgctatgtgatctgctatcatttcaatttcagctaaattatgactagaaataaatattgtcttcccctcattttttactaaatgaagtaataagcgccttatctcgtgtactccctctgggtctaatccatttgtcggctcatcaagaattagtattttaggatcattaagaatagcaaaggaaatacctagcctttgtttcattcctaaagaaaaatctttcacttttttatcttttgctttatatattcctgtaatttttaatactctgtctatttcatctaaaggcttattaatcattttttgtacataggctaaattttcatatgctgtcaaattaggatagtaggtaggtgaatcaataaaacaacccacattttcaaataattcttctttccaatctttgatatctttattattaaataatatcgttcctttatctaatggaattaatcctaatagcattcgcattgttgttgtttttcctgcaccatttggtccaataaaagcatataaacttccttcaggaacagataagtttaaatcccttacaatggattgattgtcaaaagactttgttaaatttttagtttggattgctaatttcattttgttcctcactttcttattctcaaataaaagtaagtatctattaaattcttgatctattagatattctatttaccctttacctaatgtttgcaatttggatttagaaaatatttctcgttgttttaattttttatcagtaagttcataaactctatctacacgctctaaaatattttcatcatgagtgataataatcttagtggatggtatggcaaatatattttcaataacagcatttgccgtttccctatctaaatggttagttggttcatccaaaataagaatcggatattctttcatgaacaatcgtaacatagccaacctttgtctttggccaccggagaaatttgttcctccctctgagattaaaatatcatttatactttgaaattgaatataattactcagattcaatttatcaatagactcctggatttttgaaggatcataatttatatcaaagtaagataaattctcagataaacttcctctaaataaaactccatcctgagtcattagtcctacattttttcttagttcctcactgttccaatctttaatatctctatcgtctattaatatattacccttatcgggagtatgcaattttaataataagttagctaaagtggacttaccactgccactttctccaacaatagcaatactttcgttatttttaatgttcaaacttaagttttctattatttttttgtcatcaaaactaaacgaaatattattaaattgaatcgatcctctaagaatgtttactttagtatccgatccatctttttctagttcctcttccaagatatctaaagttcttaataaaagtggtttaactgaattccaatttaaaattgatcctataattgttgaaaccggagaaaatataatactagatatagcaataaagaagaaaatattacttaaatccccttctcctttactaaaattataaaatcctacagcaagcattatgataataaatattgttgatagggaactattaaatgattctaaagcattttgttttagcgctcgtttatgtactgtatctaagtatttattataatctttttgccatacagatttaattctagaaaaaatccctgtagcctttacataatacatcgcttttaatgattcattaattttccctctatgttctcctaggtaatacgtttcgactaaattagcattatatatgaatttccctaaggaaatattgataaatagggaactagcaataaaaaacatcaatattaaagtataaaaagtctcagtatataatagatacatcaataatggaatgataactactattgatataatcatttcaattagatcctctaaaatatatcctcgtattgattctaggctcatgattcttacatttaaatcccctgcatgacgtgtagtaattttttctatgggggtattaaacatatgctcaaaaacttttgttgtactttttctatcaatttctttctgaaagtttacttttataatagaagttatagattttatccctataacaacgattaaacttcccaaaataattaaaaggtatcttacatccacttcctttgaagcattcaaaatatccataaactttttcaaaataaaggggaaagcaagaattgagatttgtgctaacaatgctaatagtgctaataaaacaatctggctaggagatacaaaatgatcaatatatctaagtaatatatgtttttcacgccttttagtatttggctgtatatcttttttgttttctattactaggatatagtcacagaacatttcctcaaaacttcttatatcaattatcatcggccctgccttaggatctacaatataaaatttatttgctttaaccctttcaataattacaaagtgattaaagccccaaaatgctatcatcggcttttgtatcctttgtaaatcagttatattttctatcctatatgcagttgcagaaagtccatacgatttactaacttttttaatatccaacaaactccatgccgattttttattgataattttactatttctaatttccgaagcttgtactgctgaaccataataatgcataatcattgctagacaactaggcccacaatcaaaagatgtcatttgcggtataaatttaattttcttccttaacatatttatcacctattctaggcattaaagtataaaatgctatttagtttattatcctctaacctttgtaaaaaatacaaaatacttcctagccctgtaaataatgcgattttatgaggattaaaatcttctatatcaaaattattcaaaaagttatttgttactttcataacaatttgtttttcattgcgctcgagcatacctccattttctagctccaataaaaagtctagtttccccattaaaccatgacataaacaataatcactattttcatgtaatgtacttaagatttgttttttaaaaaaaattaaatctgattgtatatcctcattttgatacgattctaaaattttaattctcgagattcccattccactaaatcctttacaccagctatctgtatactcatattcactcatactcattttctcacttttatgtataccatgtattactctatcgtacttatttgtttttaatatgccttttaacttataaaatgcgagaagttgtcctgataatccatgaacaaacccctttaatgaatcctctaaatttagagtatcgtgagctttccaatatacaaattcattatgtgtttgcatattattgacaatgtagtcaccgagattttcagccactttaagcaatattttataattaggattaatttgatagaacttaactgccgttaaaattagaccagctgaaccccctaatatatcaaaatgcttatcgctatatttacctttttcaatatcagagttgacatccataaatatttgcaatatcaatctttcatcgatagatgttatatgtggtaaatttgttaaatagtaagaaataattgcattaacaccatttacaaaaccataattatttttatttttgtttaatatttcttgcagggctttttgttcaagtttatttataatttcaatctgattaggatcagcattatttctcaataatgaacttattcccaataatccatcatatattccactattcaaatggtttatctcaagctccccttgccaatttgtttttaatccaataaaatctacagcaccgtcttttgatatataactgccatcaagaattttccctgtaattgcttcctttattttatttgtaggtaaattagttcgaaaattaattgtttcctttactgtattcagcttatatagattgtcattttgattagaaagggatatttctataatttttctttgtaataaaaagtcagcatatgaaatttttttaaattttgtttctagatctatttcattatttgataaactttcgcaagactcccattcatacttattaaagaaatatggaacatcataggataatagtgcctctatctctttttgaataatatctttcctagtagccaagtatatgtttttttcaagaatattccgcaaatattttatagtctttaatttattctctaataaatccggaacatttagtctatctaataaaagggtatagacttttgtatttcgatatacttttcgataattccatttagaaacactattttttaatatacacatatactcctctttgttttttaaaactgagttatatgcattctcaaaacctttaataatatcatctatataattatcatactcgtatatatcatcgttaagaaacggtaaattctgaaccgtatcttctactattgtctcttctcttatttcaattggattcgatgtaaattcattttttattttaattgtttttaccaaagacttcattactctcccaattgcactgtaatctcttattacctccctacctccactaaaccttataggtagcattctagaatttaatactgaattagataatataaaactactggtttcttcagtaacacttggatttaatgtacttcctaatgtctcaaaatcaattatgactggtgaggattgtttagctatgatattttcattatgtatgtcacttccattaatcaaatacattaccgaaagcactacacctaaattataataataatctttaatttgctcattagattcacatgattcatgattaatgtattccatatatccataatttcttttattaactacttgcggaataaagatatccgtatttaaatctttattcagttgattaattaaactatgatatagtatagaatttttcaaatcgactggttttaaaattaccttattattaaatttatcttctaaaagaattgttctctttccattattatggtagtcacctaggttaataactttttctacatgcataatattaaaacccgacattttatgaatttctttttgatctttttcaagagcaccttgcaaccaaatcatataatttatttcattttcaatgattgtaaaaattttttcgtttaatacgggtaatattttaaaaaaattcatataaaattttttaaaatgaaagaagttctttgtaaaatacttatattcttcattggtatccattcctcttaaagcattttctaccctaagtttatttatgtatacaattaaggatggccttaatacttggtatagtcttttttctaaatcaaacattatcgattcagaaaccttctcaaaattaccaaaaaaatcaattttatttattatcatatttttaaagaatactacatatgtttgtattattttttgaaagttatagttttcgtcatccttaatgacatcattacatgaaaaaccctctaaaaagataacaaaatttttttctagatattcttttgttactaaagaatgtgatccattatctattgtattcaaaattccatgtgaattatttttcataataacctcttctttttataggtaggagaaacagttagaaattcattctcattaaagagagtaaggcctttcgccttactctctttaactattagtagcattttttacaaattctttgtcccataatcgtgacacatgctacaggcacattccaaggacaatctttagttaaagtttcaacccaaccaggtcctgctccaccaactaattgttcaatctcttcatcttctacgacttgtaaatatttttcagtttccatttcaatacctaccttttatttttttgaaaatgatgttataaattcaataatttaccacaacattatctaaaaacaatataccattaaatgttaataaaaaaaaatatatttatagaaaaataaaataataggatatttaactatattaatataattaaaggagactcacttactatatcattaaaatttaaaggctattttccaagttaatatttttaaaattttataaatttattaataatcaatgctgtttaataatttaaataattcttctaatacctgaataacgattaagaatattaattaaacttgtaaaaaatagattttcagaagatatagctcaagaatattttaccataaaataggataatcaattctttttttaatagtataatgcttcgtcagaaaattttaatcatgaattgcaaaaagcatgttaaaaataaaaagatgaaattgcaagtatattcacttcacaatcccatctcttctaaaaattgtatatcatcaactctcttgatcctcgcaattctaccaaattaatagcaacacattatgtagatataggtttatactattctacatttaaatacatgtaatattgcctatactttgttattttcatgtgaaactaattcactatatatctctttctctatatttttcaagagaatttccaacctattttttgtagctagattaaaatgtggatttaattcttttattataaattcaagtatctcaaagcttatgtaatctcctaattcaagtgaatattgatcacccaagaaagtttttaattttttagagatctccactttatcttttttggtaatatttaccccatccgataacaaacctctcttagattagtcttaaatactaattcaaaaagtttttataacataataaaaatattttggaattaatataaatcatataatgaaatttttacaaataaataaaaaatatacatcataatcattaaacaatatattaagcatcgtaaacatatattggctcgtcataaaggcgtaaacattttgaccaatttccacataacgtttcccattcaccagcaggatatacttccgtacgcaatatatgaagtggtatacgtaaattcaataaccgaccactaagcgtcgtacgagtaactcccgctggcattaaaaactttgcttcaattacctttttcagttccatcaacgagtattctggataactcatcaatatttcatttgaatgaggccagacctcagtatcatttgaatgacggcgtaccgtatactcatgttgatataagctgacaatacgatgccatatctctaaatgattaaataaatcgctatttaaatcccttgcatataaaaaatgtacttgtttatttgcttctgtaatttttgcaagcaaacgtttattagcaataatcttacctgaccaaattattgtaggttctttctttaaattatttacccattcccccattggtaataaatgattccaagcacgaatttttattttttcatcaggtactacctgtacagcaacgcgtttacaacctaatgccatcatagccttcatacgatgggcaccatcaagtaacagataattaccatcactaagctcagatactaagggaggattccgtaaaacaccttcgctttccattacacgacaaatttgttccaatcttttgtgttcatatgattcatgaaagcgaatttgcttgggatgtaagagatctaaggccgaaataatttcactcataaaaacagctcctcaaataattacataaattctaagcttatcaaataactaattttctataatgattagtcgtgtttaccgatatttagcagctattagacaattatttcaaactacgtttaataattttactagtcttctaataaaacacctatttccttttccctagccctttgatagtaataagcagcaatggctacatcaaaaatggccatacccattggattaaataatattgctttgtcataagggaagttttgcagtgctcctcggattacaacgtcagcaattgatactgtatcttctttttgtaaacctctttcaaggtgcatcctttcaacatcagttttttcacgacagacttcttcccaattatcaacaactagggattttgtatattctaagatatcaggcttaaaatcacgaagagaaacattgagtagtagcgctccatctttaggtttcttatcaatataaccttctgcagaaacagtacaagtaataaaaatatcagcatcattataggcttcttcataagcattaaccttttgagttttagaataaatatcctcaggaattaattcgtctttaattccattgatatcatataggtaaacactttcgattttatcgcctaatagggcagttaccatctttaaatgcatctgaccaataggtccaaatccaataattccaactttaacattatttaaatctcttaacttggcaaactctcgaatcattaaccctgttacagaagctgttcgtattacactgaccattgctgtattaagcgtcgcaaatggttttccagtcatagcatcatttaatatagtaactgaatgagcacgctgaatacctttctcaatattcttcggaaaactagctatccatttgattcctgaaaccttaaattctcctccaatataagctggcatagcaataattctattagccggatcatcgaaacgtaagtatggcttaattggctgagaaaaatcatctaaatcaagactttttactgcctttgaaatgacatttattgtttcttcccaattaacacccatttcattgatatgtttggtatttaaatacatcataattgcttcctcatttctatatcatttttataaagaaactaattggtcttctactgatttttgtgtattaagccattctacccattctacgttgtaaatagttgatgtgtaagcttgtccattatcaggacacaagaaaacaacattaggtgtattttgaacatccttattttcaaaatacttttggattgcataatatgaagtccctgatgatccaccagcaaatattgcatgtttattaaatagctcataacaacctgcaacagtatgaacctccggtacaatcattacatcatcaatcaatgcttttttaaccataccaggtatcatactggcaccaattcctggtatgtaccgtttacgaggcttatcaccaaaaataatggacccttgactatctaccgcaataattttaatattagggaatttttcttttaatcgtgtagataccccagcgatagttcctccagtactcactccaatgaaggcataatctaactgtttaaaatcattagatatttccccaccaattccttgataatgggcttcaaagttatcagcattattatattgatttgtccagtatgcattaggaatagtatttaaaagttcttccaccttatttaaacgcgttaataaatagccacctgtttcatctcgttcatccactttagctacttgataggaagttgctctcaaaaaattctcataactatcattaatatttggatcaataactggtatgaatttcaggccgatatacctacaaagagtagcaagagcaaccgcaaagttaccagatgaagattcgataattgtagaattttcagtcacttcaccgcgacttattgctgattttaaaatatggtgagcagcacgcactttaacactattcattaaattgtgatattctagttttgcatacagattaatcttttcatgctctaatttaatcataggtgtgttgccgattaccctttctaaactctctaatttcttgagcataatttgcttcctttcttggttaaaatctaaaaaaataattaaagataatatttgtaaatgttctttcgaatgtatttcaaatagaacttatacctgaaagacaataaatgctagattctttagtatcgataagctaagcaccattcaagtactgccatagcactatttagcttgttttcggcctgggtaaatacaatacttttcggtccatcaataactgttgctgctacttcttcccctcggtgtgctgggaggtcatgcatgaaagtagcttccggatataaagtcaaaattctctctgtcactgcaaatggattaaatgcatctttccataaaggatctattttgcttgtccctgttgtttgccaccttgttgtatatacaacatccacttcactaggtaacatttttatatcatgacattcaataactttagcaccagataatcgtgcatattcttttgatttttcaagcacacttggagacactccataaccagcaggtgtaaaaagatataactccgtacctggaaaacgagataaagaaagagctagagctgcagcactgttattaccttctcccatatataaaacccgtaatccagctatttcaccaaatttttgtttcattgttgttaagtctgttagcgcttgtgttggatgttcttccgtactcattgcattaatgactgccatacgactttgagatgccagcttttccatttccttttgactatctgcagttcttgctactagtgcatccagcattcgcgaaagtacttgagtagtgtcttctatagactcccctgtattttcttgcaaatcatttggaccatacgttacaatttgtgcacccatctttaatgctgcaacagaaaatgccgatcgagttctagtcgatgttttacggaagtaaatcccaattatatttcccgctaatatttgattaggttgcgatttacctgtggcaaactctaccccacgagttacaatttggttaatatcactatcagtaagatcctcaagagtaattaaatgttttcgaatagccattattatattacctcccttttgaataattgcatgtaacaaaaatgtatttacatatgtatgtaaatacaaactactaaacagctaaagtaaaaataatagattggaaatataattcatgtggatccattaccacacttttctataattttttttaaactaatgtatagcagttgatatatagcctatatgaactcgaatactatttttactcagaaatacttacatataattctattgttagtctatattcctattttttatgatatagctctgctgaatatattacacactacaacactaaaaatatactcaaaatacagaattttcagctttctcaattctttcatcaattttctgtcaattcatattcaaattatcttttttactaataatatacatacaatgttggctgtttcttttatagcccacttctaaaaaatccacccattcaaaaataacgttttccggattgtcagttaagatacaaattactgctgcagtcattaaagagtcctctttaaaagagatatactccttctactggctcgctatttttagttatgataacctcttaattgttacagctataacgctaacaattgttattgcaaccattgatctaagtaaacaaacaatgaatgacatactaatatatacacaaagtaatctattaagcgtaaaatgattgcatctccagcaagtttaattacttattcagatctttgcttttataattttcaaaattaaatttccgaaaattttctttccttaaggaaatatcgatcattttaaactatgtaagaatgcttatcttctataaagtaattacacaaatcaacaaagtcaatttcaattattgattctggaaaactatctaaagaagcacaacaagaaagcttataatctttaccaatagtaaactttttataataaacctcattagatagcatgtcaccataaaatattgtattttttttaataacaaaagagtttaaaggtatagttagtcctttccctatccatttaacaaagctttcttttatagtccataattcataaaacacatctaattgttgttctacatttaatgaatttaaataattaaattcttcctcagtaaatatatttttaatcattgtagtatccatgggccggactttttctacatctattcctacttcttcctcatgaatagctccaacaacccaactttcggaatgcgatatattaaaatgaaaattatttaactcatccacataaggctttccgtattcattgtatttatatttaatatctttattttcttttgagaaatttgtagtaattaaatatcttattataatgtctccaattaaggcgctatattggtcgggctttcttttatatttctgtattttcatctgcttttcttttgagaccaaactcataagtttctgcataatgttatgatctatatttcctggcacacgtaccttatatatattcattatttccttcccacctaacttcttatataaatataaaaaactctcaatgaataattcctatttatttttgattagtaaaaaacattttcagaggataatattctattttacattcatattttcgacttattttctaacctctttatgtctattattgaatgggctcaaagaaaaaagtctcataatatgttatacacgaatttatgagacttttagaaaactaatagtgtacaatttcaaataatatttcacctatttgcatgtgctaataagagcatttgtttaaaactcatttttatactctttaccaactcatgaatatgcggtttctctaacatactcagatgggaacctggcacttgcaaagcgtatacttcccctgatgtatattcattccatctgttataatctactagtgggtgaatgtcattaatagatgcattaaatagaaagatatctgcttttattttttgtttacaattatattttaggtatgcatatctattagctatcattacttttaacttattcatcattggatcttcaaaattttgctgacaactattttcattcaatgtaaattttttcagtaaagattctattaattgttcttcactcatttgctcaaaactaattttctcaatccctaactgatcattgaatttttccaattcttcaaaggcattcttaatatttaaactaagaatctccttaccttgttcaataggatgaacatcaagtaaacctagaaaactaactttatcacctagttcttctaattttctagccatttcaaatgcaactattcctccaaaagaccatcctaataaggtatatggcccttctttttttactagtttaatctcttctatatatcttaccgccatttcctctacagataagtttgaaaatctattatcatcatatcctatagattgtaacccatatacagtcttatcctctcctaattctctagccaaatcataatagtttaatataccccctccttgtccatgaacaatgaaccattgactatccttgtttgtcccattttgaattggaattaaacactcactgtctattcctttattcctacttattacatcacttaattgttcaatagtagcattttgaaataataaacttaatggcagttgtacattaaacattctcttgatattttcgaataactttaatcccttaagagaatgaccacctaattcaaagaaattatcatttataccaatattatttacgcctaatatactactccaaatatcaattaaactactatctatgtcatttcttggtggtacataattactattgtccagtgtatttagcttcggtaacttacttctatctattttcccattttgtgttaatggtatattgtgaattggtatgagttgttgaggtatcatataatatggtaactttgttgccaaatatgctcttacctctggaataggaatatctttttctgtaactacgtatgcacataaatacttttccccagcttcatcttcttgatctattactacggccgttttgattgtctcatattttaacaaactcgcttctatctcacctagttctattcgatatccccttatttttacttgatgatcgactcgacccaagtattcaatgttaccatcaggtagccaccttgctatatcccctgttttatatagtttctcacctcgttcaaatggatgatcaataaatttatctgctgttaattcttttcgattgatgtatcctctagctaaccctatgccagagatacatatttcacctggaacacctataggttgtatcctataaaatgaatccaatatataaattttagtatttaacaatggtgaacctatcggtacgttttgtgttgtaatttctttattactctcatatcgataagatgtacaacaaactgtagcctctgtaggtccgtatccatttaatatttggaggttccccctaaatagatgatcgtattttgcgagtaattctgttttaatgggttctactcccacaagtagcttatttaacactatcttctggttatctctaacaaaataatcatatatttcatttaataaagtaggtggaatatatgataatgtaacctgttcttcaagaataacttgtacaagttttgatacatcaaacttctcaccttgataaatagtcattcttgcgccatatatcaatgggacaaatatctcaaaaatagtaacatcaaaagaaatactacttgagaatagaacgttatcagttatccctatatcttgagagaaatcttcatacattgcacacaaaaaattagtcaaggatcgatgttcaatcattactcctttaggttgtcctgtagaacctgatgtataaataacatacgctaagttgtgaggttctatcatcatttgcatgtcttctcctggttcttcttcaaaagacatatccattagatctattacattaccttggaattctattccctttatttgatgtactaatacatgtgaacacccactgtctgtcagcatatattccactctttgttttggtaagtcggtatcaattggtaaatacgccccacctgcttttaagacacctaatatacctataaccatctcgatggatcgttccattatcacaccaacaatggattctcttttaactccttggtctaataaccttctcgccaactgattagcttttatatttaattcattatatgtaattcctttttcattacatacaacggctatttgattagggttccgttttacttgttcttcaaacattttatgcactaataaatgattagaatttgaattctcttttttgttaaattcattcataatacaatgttcttcttctatagataacatattaatattacgcaatcgtactctagggttattagttacttcctcaactatatttgtaaaatgtaccattaacctttctattgtctccgctttaaataacttagtactatattctacttttaaatgaatgttattatctatttccgttgctactaatgacaaatcaaattttgaaactgactgcttaaacggatacggtgtaaattctaattcaccaatagatattggattcatatccatgttttgaaaaacaaacatggtatcaaataatggatttctacttgtatccctatgcaagtctaaaccttctaatagttcttcaaaaggatagtcttgattttcataagcttctaatgtattgagttttaatctactcaaaaactcaataaactcatcgtcattttctagataatttctcattaccaaagtattaataaacataccaatcatatgattagtatcagaatgagaccttccagcaataggcgaacctacaataatgtcttcttgacctgtgtatctagataaaagtatgttataaatggccaataaaatcatatatggcgtagtaccagtttcagttgctagcttatttactttaaaagttaaatctcttcccaaattaaaagaacaaacattacctttaaagctttgtatagtcggtctttgaaaatcggttggaaaatttaaaaccgggagttctccttttaaagttgttaaccaataattcttttgttcactaattagattcttatagtaaggtccattttgccacatcacatagtctttgtactgcactctcaattttggaagctcatttcctttatacaattctacaaactcttttattaatatccccattgataaaccatcagatattatatgatgcatatctactacaaggatatgtctttcttctgctatccttaaaagcaacacccttaataatggaggttttgataaatcaaatggacttataaactcatgtattaaataatccgcatctttttcatttacatgaacgtattcaatattgaaatctacattaggctcaattttctgcactaattccccatctaaaatttgaaaagaagttcttaatatttcatgtctctcaattaaagattgaaatatattttcaaacttatctttacaaatatccccttctactttaagtattgtgggcatattataagttgtatttgtaccatcttcgaattgatctactataaacattctcttttgtgacgtagaagctaaataatactcttgttgttttacaggttctatggaaatataattacttttttccatttctaatatacattttgaaaaatcaaccaaaataggaaacttaaatagggatttaatagataattgcacattaaattctttattaacgatagaaattagcctagcagcctttaatgaatgaccacctatctcaaaaaaattatcccgtattcctaccctttgtattcctaatacatctttccaaatctcaactaattttctttctgtagaatttgtcggctctagatgactagatttcaaattatttataggttgaggtaatttttttctatctatttttccgttttgtgttaacggtatgttttgaatggatatgatttgttgaggtatcatataatatggtaacttggttgctaaatatgctcttacctctggaataggaatatctttttcggtaactacatacgcacataaatacttttctccactttcatcttctcgctgtattactacggcggttttgattgtctcatattttaacaaacttgcttctatctcacctagttctattcgatatccccttattttcacttgatgatcaactcgtcccaagtattcaatgttaccatcaggtagccatctcgctatatctcctgttttatataatttctcaccatgttcaaatggatgatcaataaatttatctgctgttaattcttttcgattgatgtatcctctagctaaccctatgccagaaatacatatttctcctggaacacctataggttgtagcctgtgaaatgaatccaatatataaattttagtatttaacaatggcgaacctattggtacgttttgtgttgtaatttctttatccctctcatattgataagatgtacaacaaactgtagcctctgtaggtccgtataaatttaatatttggaggttccccctaaatagatgatcgtattttgcgagtaattctgttttaattggttctactcccacgaaaagtttatttaacgatatcttctgattcgcccttacaaaataatcatatatttcatttaataaggtaggtggaatatatgctaacgtgacctgttcctcaagaatgacttgtacaagttttggtacatcaaacttctcaccttgataaatagtcattcttgctccatataccaatgggacaaatatttcaaatatagtaacatcaaaagaaatactacttgagaatagtacattatcagttatccctatatcttgagagaagtcctcatacattgcacacaaaaaattagttaaggaacgatgttcaatcattacccctttgggctggcctgtagaacctgatgtataaataacatatgccaaattttgaggttccatcgttatctgcaaatcttctaattgttcttcttcaaaagaaatatccattagatttattacactaccttgaaatgctactccctttataatagagttttgatatgttagtagatgtgaacacccgctgtctgtcagcatatattccactctttgttttggtaaatcggtatcaatcggtaaatacgccccacccgcttttaagatacctaatatgcctacaatcatctcaatagagcgttccatcatcacaccaacaatggattctcttttcactccctgatctaataaccttctcgccaactgattagcttttatatttaattgcttatatgtaatttcttttccattacatacaatcgctatttgattaggattctgttttacctgctcttcaaataattgaggagctgttacagtctcacaaagtaatgttttatgaactttagtcgtatgattgaaatcaaataatatttgattcttttctgttttaggcattacatctagatccattgcagatttatttggatctttcattaatatatctaaaatattatataaatgattaactattctactaactaatccttcactatataaagtagaattgtaatccacttgaacctttaactgttcttcatttttcataaacctaataaccatatcagagtttattttatctgtactctcataacaatgaatatcatctaacattactattgtatttaatacgggaagattattactctctccatctagacttaataattgagtaagtttattaaaaggaaaatgacaatgttcatttgactctaaaattgtttctttaattttatatattatttctttgaaattatcttcttgatttatttgagtacgtaataataaaaagttgttttgaaaaaccgtctcttcttgaccttgcttaaaaactggcattccaattactacatcatccctattggtatatctacttaagagatatttcacgcctgataataaaatagtgtacagtaacatatcagaattattgctaattgctacagctctcttcgcaatatccgatgggaattgacaataataactttctttagaagcctgaatattatttaaagacagacaatcacaaggaaatctacttaactcaacatcacctgataacttgtctaaccaatattctttttcttttttaaatttttcactagataataaaacctgctgggtaaatttatcaagcattttttcttcccaccattctctatgatattgatactaaatactacatatttagtggttatgttccccatagacctatccgttttatcatgagggggcacaatcatactcgtcattgggagttttcttcctcagtaataaaactcccaatgacgaccaattagattgctactttaacgatagaagtttcacataaagcatagaaatgcacttttctcttactcagatacatctcttaatttttttacttcacagattttaccctatctagtattttcataattaactcgcccacgatgtcagcttgatgtagtaaaaacatatgaccaccattaactattagaaaatgaacctcattgccccattctacccacttcttagccccttttactgtataattagagtctgttgttccactaataatatataggggcgctttcaacaatgttgtgtcatcatttatataattctcaatggcacgaaagtctgatcgaataactggaaggatatagtttaaaagctcctgatgttgtaatacttcatccggtaatcctcccaaagactttatataatctataaagtctttatcatctaaatgatttgtttttcttcttatttccggtggattcatagcagagataataacatttttaggatttatgcccttactttctaaaatttgagccatacggtgaactataattcctcccatgctatggccaaataatgtaacctctccctctaaaattggttgcatctccattaaatataaattaacaagatcatctatgttatcaactagtggagaaagattaggaccatggcctggaggatcaaatgaaataagttttatatctttcggtaaataattctttaaaggtaaaaaagaattcgaatagcccccagcataaggaacacaaaccaaatattttttactattcaatcctggcgataaatctttcattaattttctcaagtgacttctcctttattaaataaaattttcatcaaatagttgtttaatcaaacaaattatcaatttcttcatcactaaggtttaaggtttcaaaatctgatgaagtaaattcttttgtttgcatttgacaacaggattggatatatgtctgtagtcgttctagataatctgaaaataaattttctaaaaaattcttttgaaaatgacttgtactaaatgtcacatgaatttctaagcttttattcttaaccatagccacaatatccaataatgcagtaatatgattatcttttgattgttcactgccactttgataatcaacaatagtaaaccatccatccccgagagaattatctatctctcctaaatagttaaaacgaattatattttgagttaaatctttgcaagaaggaaacttctctttaagaattccatatccaattcccttattaggtcttttacgaacctcttctttaacactctttatttgattagcaatattatgcgaaacttgtaatacaataggatacatcgttgtaaaccaccctactgtacgtgaaatatcaagatgctcaaataattcctctcgaccatgaccttctaactcaaatttaatttgatcttggtttgtatattcacctaaattttctgtcaacacagcaagtaacaactccattggttgtgtattgtaaggcacatttgcagtagttaatagttttcttgtatcatctgcattcaatgtaaaggtaagagtcgtacaactttcaacagtactattttctttttctctattaatttgaaaattattatctagcgtgttatctatggattcccaataatctaattcagcatgtactaaattaactcctcgactatttaaagcttcagaccaatcttggaaagagttagtttttaatggtagcgatggaacttctcctaaatacaagctattcaaacatcggtttgcatcttcaattaaaatacgccaggacacagcatcaacaataaggtggtgtgcagttaataataacaactgttgatcatttgaaagctggaataaggcccctttaaataatggtcctacattcaaatttaaacttccttttaactcttcaccttttatatgaacctgattcaaagccatttcaattggaatttcagacaaatcaaacatggtaaccttagaatcaacaatggacatatcttcgtcataatagaagtaatcctgcttatcctcgtaccttaaccgtaacaaatcatgatgatgcatgatcgtatttaacatcttattaacatattcttctttaaccggcttcttcaaagacagtaataccgattgattccaatgatgcgggttcttaaactgttgatcaaggaaccaacgcataataggcgtaggctctacctttcctgttaccaatgtttgtgagactgtaacatctttttgtttaactaacattgctgccaattcacttacaactggataatttagtacatctttaactctaactttccatcccagttcttgtaatctagcgctcacttggatcgctttaatagaatctccacctaaatgataaaaattactatgcaattcgattctatcagtctgtaatatttccttgagaacttcactaaccattccagtaacatcttcatctacttcttctaaatgagtatgattagaaccgttatttaacatcggatctggcaacgcttgacgatctacctttccattgatagtaagcggtagctgatccatatagataaaaaatgaaggaatcatataacttggtagcatatgcgaaataaaactgcgtatttctatattttgaacactgtctttcaaaacaatgtaagcaactagatgatttgaattatcctcaccttgccaattcaccactactacatctttaacagacttgtgttgtaacagtgcattctcaacttcccctatttcaatacgatatcctttaactttcacttgagaatccatccgtccttgatactcaattaatccatttggcaacatgacagctaagtcaccacttcgatacatcttctcactcgaaataaatggattggataaaaaacgttgcgctgttaaatccggacgatttaagtaacctttagctaccccatcacccgatatataaatttctccttttacaccaataggaaccggctgaagattcttatccaataaatatatttgaacattatcagctggtgtaccaattggtacggatgctcttcgatctagatctggatcataacgatgaatcatacatccaaccacagtttcagttggtccatattcattaattatttcaactttaccgctaaaaagatcatatatcttttcggctactgaggttttcaaatcctctccacccacaatcaatctgcgaagagatgaaactcttgggggtgaatagttatttaacaatgctaaatgtgaaggagtaactttcaacactgttactacattttccttgagtatttttgacaaaataaactcatcttcattatcatgatatattactaacaataaaccacttattaaaggagtgaatattgaagttactgttaaatcaaaagaaacggatgaatataatgcaaaaacatcattttcactactaatatagttctttttagcccaggaaatatagttaaccaatccacattgagtgattacagttcctttaggattccccgtggttccagaggtataaattatatatattggatcatttggtgcatttactaggtttagattggcattatctccttcataaagtttctgatcacatatattaattttctcacctaaatattctaaattaccctcatttgtatagtcagttaaaagtaatgttgtgccgctatcattcaaaatataacgaattcggtcctctgggtaggaaggatctataggcaaatatgtacctccagccttaataactccccaaattgcaattactatctcaagtgaatgtttagctagtatacccacgacttgaccatttttgactcctttttctcgtaactttcttgctaactgattagatttcttatttaattcaagataagtcattgatctatcagcatgttgaattgctattttttctggtgtctgttttacttgttcttcaaataattcttgaatagttttttctttcggatacacaacagctgtattgttaaatttctctaacataaacttttgctcatcatccgataacaaagataattcttttatcgattgatcttcattacgtaaaacttgttctattaaagctaaaaacctttcatgcatacaattgatttgatcttcttcaaaatccgcgactttataatcatattgaatttctaaaccttcatctgcccattccttaataactaactgcaatgaataggcttggtaaccactgtaaaactccacgttttctaaagaaaatccatcaatagtatttttaagttttgtattatagtaattcacactatattgaaataaaccatcgtatcctttactagtcaattgcaagtcttttaccaataagttataaggataacgctggtgaaatagacattgttttatttcatgatttactcttttaatgaaagatagaacactctcatcttcatccacatttaaccgtaacggcattgtgctagtaaacatacctactattttcttttctagtacaccggaacgatttagtacaggagatccaatgattatgtctgattgatcatacattttatgaatataaataagcataaaggttgaaaataatgtattcatagatattctatgtttttgtataaaagactgtagagcaaccgatttttctttttcaattaaaaatatctttcgtttcccttctagagaatgagatgtttttgataaaaagaaatctggcagattcataaatttctcattccaataattcttattttttacgtatcgaggggattccagatatttctcctctgcttgtaaataagacagataagtagattcaaccgtatcatttatatgctcatcattctttaacttagagtaaaaatcgataatttgactcgtcataagttggattgtccaaccatcagctataatatgatgaaacttaacaaaataggagctttctacatcacttattttcaagagcacaaattcaaacagagggcctccttcaagtggaatttgtttttgaaattcatcctgggcccattttctagcttctaaacttggattatgatgattagaaaaatcaattaaacgtattggtgtaggttcaaatggtgatatatattggtggggttctctatgttgttgaaaaatccgtagacgtaaaccatcatttttcttaatgaataattgaattgctttttctaaaattgtaaaattaatttccccattaataagaaccatccctccgatgttatacatagatgtgtttggataaatttgttcattataccaaactcttttttgtggatgcgtaagagaatgctttacaattgtttgttgcatatttccacttcccctctatccacatccgttggtatttccggaaattgtatattaatatagtgaggataaggatttatattctcaagattatgttctaaaattaatattccattttcgttgctagtttccttaaatccagctaatcggtacgtaacaaacatcatacggttacggtcagtctgtcgaaactcagccaaaaagcgtttacctgcctgttttgtcctttccattagatatgtgaggagtatagtaccaacgccacgggacattacacgacaagacatgagaagaagttttaggcagtcggcttcctccgtcctttttacaagtgttaaaccaatcttcccataggagccatatttgtctgataactcacaaactaataataaataatctggatgattacgataatagtttaattcatcataatcataggtaataccagtcgaatttaattgattcgtacgtactgttaactcctctgcacgctgcaaatcttcctcacgagcctcactaatcacaaaattcatcccaagtgaagctaaaaattcttcttttgggccttcatattcttcttcatccttcgttctcttaagattttctaaatacatcagtcttcgacgacctgaatcttctgtaattctttttggttgtagtcgtggcaagtctaataacgacttatattcattcacatgtatacacagaatatcattatgaacactctgtacttcttctaattcaaaaggttggtcatcaatgaacgcaaaagtatcaatacctatgtttaaattttttctaattttctcaatggaactagatttagagttccaatgaatctccggatataaaaaatactcttctattccaaattcccgtaatttagctattgcatcttcgtagttatttttactagcaactgattgcagtattccacgtcgatctaattcacatataatttcataaattccaggttttaaagtaactgtaccactctctaataaaacaccatcccaaattgtacaatctaagtcccaaacaacacatttaatttccttactcatgataatgcctcctttgttttattcattttcacagttcccatctccatcactataagcttatctgccaaatgaaaatattgatcgtcgtgagtaatagcaataatacatttaccctttgctcgcatttgaggtaacaattcttcataaaagaagcgtctataaccaggatcttgatccgctgcccattcatcaaataaaagtataggtcgatcttccaaatacgtaaccagcaatgccaaccttttcttttgtccagttgatagttgcgtagtagtaaagcgcccattctcaatgccaaccttgtcactcagttggagaagttctaaataatgatcgatttctgctttcattccttctgtattaattccatatagcctatcaaaaacatgaaaatcactcaggatagctgaatagtattgattcaattcctctggagctatttcttttccatttaataaaatgttaccttcattaggttcatataacccagtaatcagttttgataaagtagattttccactcccattaccaccagcaataaagactatttctccagaattaaactccatgtctattggaccaataccaaaaccagtaaaatctccatctttattcttatacttataacttacattttgtagctgcaaacaaattggcacatctaagtactcttttgttgtcgcgatttgctcatttgcctttatatgatctacactcttcaccatttgttgaatacgttgccaagaaatacgtacatttacgagctgagggataccgcccagtatttcattaactggacctgtcatatacagaaaaacgattacatagttacttatcgtctctttcggcatattaacaaaaatttctggaaatacgaaaactacaataccaataacaaaaatgaataatagttctcccagaacaaacacatttgcaaatttaatatctcctatcgttcgtttaacacgatagttattacagctttcattcataacttctcgaaaatcgtttcgttttccagtatgaagcctaagctctttgaaaccatgccttagatcaccaatcaaacgaaaatatacattctgaatatctcttgtttcattccaaactttatctgcttgtcgtccgatcaaagaatatacccctgcagtaataaagatgatacacaaggatagtaaaaaggcatacatattcattacaccaagatagagaaaacaaaatagtaacgttaataaacttgttccagcagtaactaatagattgagagaacgagagataacttccgtatcgttatttaatgtcgcctctattcggcccttctcaatcaactccaatttgtaataaggagtctgtaacaacttatctgttaattccatccttttttcataaactagctcgtttgtatacgatacaatgctagttctaataatacgttgtgaaaagacatacataacgattccaagtacaaagtaaaacaacaagccattttccaaattatttgatctaacaaacgtttcattaatcacaaaaatgagaaaggcattaccaaatcctgatattaatcccaaaacaattaaagtcaaaagcgactttcccttttgtcttggaaaacaaagatttaagaatgtatggataacataggccaaacccaccccagcaattgcatatattgcaagtacaacagttgaaggagcccaaacttttataaatgcccacggaagccctccaaacaagagatttggtagttgataaagtgcataaatcattagcccatatatcgcaacaactaataccatatgtaaccatgtttttcccgttggtaatataaactttctttttctaaaaataatctccctgattaaatgaaataacatgaccaataacgttagtaaacacaaagatgagatcacaaataaggctgttcctatttgatccgttttcttatattcatcatagagtaacggtttaacttctttatctatcatcatatttaaaagactgctaccgatatagtaagtgtaattactattcagattcgctaatactacgacccctatctgttcctcatcacggaaaccaatatacgatgaataatttgggttacttccaccatgtgaaatttcccctccaccactttgatagacctcccatccagctgcatatgaagctccattgctatctggggcaacctttctattcgctttatgagaatcgttaatcaattcctccggaaacatcctaggcttttcaaccccaagctgtaattttaaccatctttccatatcatttatatttgaaataaaatatccagccggtgtattccccctataattaggagcgtcatagggtaatgattgtaagaaattacgcttgtaaccttgggccatgttatctaatggggccatctcacgtccagcgtatgtactcaataaatccaactttgatagcacatgatcttgaacatatctttcaaatgattgattagttgccttctcgattactaatcctaatagatcgtagttaaccgtagaatattcaaaactgctacccggctctcggtttagtcctattggcataacattcctaatcgttttctcaatagaatctttgccattggttataggaatatatccaatggccttttccggtattccactagtatggtgtaataagtcataaagtgtaatttcataaggtttgcctttatactccatttcaaaccatgaaacatatttagttaaagaatcactaagtttaattttcccttctttttctagctgcaatacagctaatgccgtaaaagcttttgaagtagaacctagctcgaaaagcgtctcattcgtaacttgacgtttattgtctatatcggcataaccataattcttcttataaatcgtttcgtttccttttacaattactactgaaagtccaggaatacccgcttgagatatttgttcttctatatgcttctgtattttcttctcattaaactgtaccgtttcctgcgcttccacctgtcgataagggagtactattaaagtcattaaaatgataaacttcaaccatatgtttaacttcatatttttagccctcttttagttaacttggattaacttttcaattttctttttaaatggttgcacaacattttgaccaatacgttcaatttcatgctcactaatctgagaagtaataagaaaataatttgcccctatttcccaaaaatcagttaatgtcgagatgacttcctcatagctaccaactatagaaattgaattagatgggttaactaaacttagacctccccaaagatgatcatctatccacatactatcttttgtaattaaatctttgtatcggcgaagtccaacagaatctgcattatctaaaaatagcttagtcatcctctttaaggctgctggtgttctctcaagtaattcatatgcttctttatatgcttcttccgaagtctcacgagcaatgatgtctactaaaatagcacctggaattttctcgcgcccatattgcttagcgtaattattaactgtttgatagtgttctctaagacttttgcggtctgttgcataaagtatataagcatcaccatactctgcagctactctcattgcctcctcggaggaccccgctacaaagtagcgggcacttcgagagagatcttcctttggataaatatcactattttctacttgataaaactcacctttatagctagttactcctcgtcttaattgttgtaacagctcaatatattcttttgtcctagcatatcgaacatggtgcggttctggtaatccatcacgcgcaaggacaagcgaggcacttccagttacaatgttaatatctgcacgattaccaattaaactatttaaagtattcaatgcttttgctgttacggtaggaagcatctggtttgtattttgcgcaaccaaaatctttacaaactccgtattcattccaatcatagacgctgctatcattggatcaacagatgttggtgcaatggaaaccaataccgagtcaaagttattcttctcagctcttttagcttgattaacatattcctctagaagttcttttgtttgtggtgttggaataacaggtaatccccagcaaaactcaacttttgacggaactacttctttattaatcatgttgttcccctccctttactactttctactttttaaagcagataatgtatttttcataaccgatttcgctttcaataactcttttttatttgttaaattgttatttacttcttgattacttaaatatttagcaagagatttaattgacgtatgctcataaagaacaactataggtaagtctcgtttaaaggcctcttttaatttcacattaatacgaacaagatctaaagaactcattcctagatcgaagaaattatcgtaaattcctatttcttcgattccaaacatatcttttaataattcgtataattgttgttcaatttcattagttggtggtctatacgttgtggaaacatctgaacgattctgctttaatctattcttacttcctttttccaatagttcattataatagttggcaccatttaaaagtttccaatgtaaatctattggagaaaccacgacttgttgttgatttctattgatgatactacggaatacttttaaaccctcttctacagttacaccatcatgtaatacactttccatatccatattaaattgctttgcccatattttagccgacttaagtgacatacccacctcttgccaatctggccaattaatagctacagtgaacactccatcatgagcccgcttataaaacgcaaatgcatctaaaaattcattcgctgcattataaccactctgaccaaatttcatatgatacgccacattaccaattgatgaacataatacgaagaaatcaattggttcatcttttaataaagcatcgagtactagtgtacctttaattttcggagctaaaattttattattagattctttttcacgattcatcataatacctagataatcagcgacacctgctgcatgaattacgccattaatagaaccaaaacgagatttagccttttcaattgcctgtttcatatcatcttgattggaaacatcagaacttaggatcatgtattctgcaccttgagactccattgtcaacaaatcagaaataactcggcttacacgctcgtctttattttctaagtactgttcccattgattacgtggtgggaactctgagcggccaatcaatataagtttgacatttggtactctattagctaaatcttttgcaatttcaaatccaattccaccaagtccaccagtaattaaataaacgccaccctctcgtaatctatcaatttctacatcttcttcctcaaaaggactttgaataatcgtttgcgcccatcgatgacgtcctcgataagctacaactatatcagtagaatccacaaaactctccattaaacccgcttcttcaaacatttgttgagaatctgtatccatatcaatggtacgacattttatattttgaaactcaagattgcatatttttgaaaagcctagaattgtagcttgctctggctttaagttcagctctgtacctgtaacttcaaacatacggtcagtaaaaatgtttaactgtaatgcgccctcataattaattttcccaattgcttgtgcaatataaagtaacgaataatatccttcatccattgatcgttcaattctctcttgatcgagaataacatcattaactggattaaagctccaagcatgtataatcttatttggtaataaatctttttgttctaattctgaaaatagcatttcataatgcattttttgagatggacatatcgtatataaaccgtcggatttttcagagaaaataccacctgttttaacttcaattacatcatgaccttctctttttaatttttctatcagtcgattgaatcgatttagatgatcattgaaaataagccatttatatttttgttctttctttatttgtatagattttaatgttttgcgttcccaagaaggcaaataaaaccagtctttaatattagcctgtttattatggcctcttgtttcctgagttaaactctgagattgagtattaaaaaatggatcagctttaaatcgttttttcatgaaaggatacgttggtaaatctaataaccttttattctcactgttattaaaagtattccaatttatagttccaccttgcatccataaccgtcccatttgcttgcataaatgctcgaagtcatttgatttatccagaggatgacgtaacatgtttaaagccaattgatctttacttctatttaaatgttttaatacaaaagttgataatgcattacctgggccaatctcaaggcaaattacattttttaaatgaaaaatttcagataatccctttgaaaattgaacagtacttcgtagatgctgtgcccaataagaaggtgatgtggcttcatttgctgtaatcatttcacctgtaacattagatatataaggtattttaggacttgataattttatatttcctacagcttgctcaaatgcatctagaacttcatccatcattcgagaatggaaagcatgcgaagtaaatagacgcgttgtctttactccatgatttaaaagtaattcctcaatcttattgattgaaagtacagtaccagaaattactgaatgttgagaggaatttacagctgctatatctacatcatctgttatataggtttgtaattcatcaacagataaatttacacttagcatagcgccttctgatacgctattcattaacttccctctaatcattactaaatgtaatgcatcttcataagacattacttctgctaaacaagctgctacaaactcaccaatactatggccaaacatgacccttggataaactccccaattcattagaagcttggctaatgcatattcaatagtgaatagtagaggttgcgtcattgaagttctatttaactgttcagttgctttatcctctgtctcctttgtaggatacaaaatatttttcatgtctatatctaaccaatttgagagtaaggctaaaccttgatcaacgtgttcacgaaatacaggttcattttcatataaatctctacccatattgatatactgtgatccttgccctgaaaaaagaaaggctaaaggtctactctccattgcgtttgttttctctagtcccgtatcaccaagtttttctatggcatcctctattccattaacaactacagcagttctgtatggaaattcacgacgacctttttgtaatgtataagctgtatcagatagtgatatctctcgattccccttcaaatgcaataatagatcgttagtagctttatctaaggattcctctgtttttgctgaaacagttaataagttccaagattgtttttcaaaattcttagcattgtcaggaacagactctaacactatatgtgcattagttccacccatcccaaacgaactaacacccgctcttcttacctctcctttccatgggataagttccgtatttacacgaaacggattttttccaaaatcaatgctagggtttgggttattataatgaaggctcggcggaattttcttgtttttcaaagctaagaccgtctttataaatcctccaactcctgctgcagcatctaaatgtccaatgttcgtcttcactgatccaattaaaattctacctggttcttgcttaccaaaagctaacttcaatgcttctacttctataggatcacctagttgcgtaccagtaccatgagtttctatatatgagatttcttcaggcttaacgccagctatttcatgagccgattttataacagcagcttgtccatcaacccctggcgctgtaaatccagccttattggacccatcattgtttactgcagcccccttaataactccatgtattaaattcccatctcgaagagcgtcctccaaccttttcagtactacaataccagcaccatttccacccactgttccttgagcatccttatcaaaagctcgacaatgaccatctggtgagaaaatcataccatcttcatataaatatcctgtttttgttggataagttatacttactcccccggccagagctatatcgcatcgtccatcaataagatctgcccatgcgttttgaatagcaactaaggaggtagaacaagctgtttgtactgtaaccgctggtccttttagatttaatttataagccaatcgagtagcaaagaaatctttttcgtttaacaacattgcttggaaatcttctaatgtattagaagattcactggcaatagaacgaagccagtggaaatttggtgatcctccaacataaactcctgtattcatatgagaagaattaacctcacctgcttgttctagtgcttcccatgcgcattcatgaagtattcgcagttgtggatccatcatttcagcttcttttagactgtaatcaaaaaattcattatcgaatgcatctacatcttctaaataccctttagattttatataattaggtttttgaatcacttcttttggtatgcccatctcactaagttcttcatctgtaaatgtacgaatggattctatcccttgttctaaatttgaccagaattgcttaagattagaagcgcctggcatacgaaccgccataccaaccactgctacatcatttttattcatagataaaaaattttctttcttaacttcttcaggttggtgttccatagcattatcacttctaaagtaggaagcttgatcatgaaccgttgggtatcggaataacataggcattgtaagttctttttcaaacttgcttcgtaaacgagagaacaatcgaaccatttttaaggagttccctccaacatcaaagaaattatcatacaaccctactttttctacccccaaaacttccttccaaacatcagctaccgttgtttcaagctcatctagtaaatcatttggttgtactaacttagtaggcttaggtaaagcacgacgattaacttttccattcgtagttaatggcatttcacttaaaagtacaaaatacataggtatcatatacgaaggtattttgtcagtaagataataacgtaattcattttgagatatatcttgatcagttagtatataagcacacagttcttgttcctctccaaaagcaatagataaaactaccgcttccttcacatccgcatgctgttgtaaatgatgttctatttctcctgtttcaattcgataaccacgtatcttcacttgatgatcactacgacctatatactccatttcgccattttcaagaatacggactaaatctcctgatctatataatctttcacttggattataaggattctgtataaaacgttcactgtttagttcaggacgatttagatatccccgcgcaactccatatcctccaacataaagttccccttgcattcccttaggtgtaggattcatatgtttgtcaaatacatagcacgaatacgtaggaagaggcacgcctatagcactaagattactgtgcatttctttttctccaatttccttataagtaacatgtactgtcgtctcagttattccatacatatttactatgaccgtattaggtgaacgcttaaaccaactttgcagtaaacctggcttcagcatttctcctccaaatgtaagtaacctaattctgaaagaaagtttaggcatttcttcaactacttgctgaaaaacatagaatgcagatggtgtttgattaaatatcgttactccctcatctgcaaccaactgagcaagtttatacgtatcacggattgttttttttgttgccaggacaagacgtccaccataagtaagggatccaaatatctcccaaactgacatatcaaaacagaaagaatgaaacagtaaccacacatcattactagaaaatttaaaactatttggttgatgcataacaagttgtattacatttcgatgttcaatcataacccctttaggacgtcctgttgttccagaagtataaatgacatatgctaaattggttggggcaacatctactctctcgaaatcttgcataggtgtctcattgagttcttcaataaaaagcattgtgctatcaaatttaactttatcctcaaataaatttgaggttattattacatttgaaccactatcttgaagaataaaatcaattcgttcctgaggataatcaggatcaattggaacataggccccacctgcttttaaaataccaagtagagagataatcatattaaatgagtaatccaacattacagctactggagaatctaaagttacaccttcttttagaagagcaaatgccactttatccgcacgctcattcaactctccataagtcatctcactattctcaaatgtaagtgccactctctcaggatgcttttcagcttgcatctcaattaattgatgaagtgttgtgtgtgggaatgtagcactttgattttgaccaccttgaagcaaaaacttttcttctgcctcatctaacattttaagagtttgtattggttgtccttcatctaaaagcattgaatctaatagctgtataaaatggttagttatactggtaataatggattcatcaaatacatcttcaggccacatcattgcaagtttaatagaatcgaaacactctattgagacagttaaatcatagttggtcatttcatttacttcataacctgaaattcttacaccttcatcaatttctttcagcttttctatatcaagagggtaattctcaactaccataatagtgtcaaatgacacgtttaaatcaacaattggagtcgtttcatattcagttcttctttggacatcactttgaattatttgtaaaagatctgaaacagtcattctcccatcagcacttacacgaagtggtggtgtatttataaataaacctaccatttcactcagaccatgcattggaattgaacgaccagatactgttgtaccgaatattacgtcctctgaatttttgtatctttgtaataatagaccccaggctgtataaaataatgtagccaatgttacaccttgattacttgcaaaacttcggaatctatcacttcgctctttatctatctcttttacatatgtttttgctttttttagttcattagaattcttattggataaatttatttgttcagttaattcatttaaatattgttcccaaaaaagcttttgttttgatttatcttgtttttgttgccatagtatatattctttaaatttctttttatttatagatgatggtacctctccctttattaactctcgatatacctcaataaactcttgtaaaataataccattactccaaccatcaaacaaaatatgatgatgacgtaaaaccatttcatattcgccttcgttcaaatggcacagttcgatagaaaagggaactgtttgtaaatcaaagctttctgtattattagagactttaccatcactatacataatcttcggagtatgcttttttagtataagttgtacaggttgtttaactttttcccatcgaaaaattgtacgtagcatttcattttcccgcgtcacataattccacgcctcttcaaactttggaatattaatttttccagttaagcaaagtcgaagttcttcatgatatagctttccttcgggttctttcaaataatgataaagaattccttcctgcactggtgtaagggcgattacatcttcaatatcttctttatgaatctttactgctttcctcattaacagaacctcctacaagtgtggtatggtgtgaatatttatcggaacctaataaggcaagtgcttttctatctatctttccgctatccgttaatggcatttcatttacacgtacaaaacggttaggtatcatataatctggtaaaaataagcgaagatatttttttaacctctctaactcaatatcattttctgactcatagaaagctattaacttaactaccatctctgattcttgtcttacaattaccgcacattgtaaaactccttcacaagacattaaacacgattctatttcccctaactcaatacgaagcccattaactttaacttgaaaatcaattcttccatgaaactcaatattcccatccgatcttattaaagctaagtcaccagttttatatatacgggtatcaagggaatattgtacaaacttttctgccgttaattgcggcctatttacatatccacgtgctaatcctatacctgagatacataattctcctatatggccttcaggaagtttattaccatatttatcaacaacaaacatctcaatattcttaattggtcgccctattggaacgctcccttctgtaatctcatgtgtcggacaatcataagcagtcacatcaatggttgcttcagtaggtccgtacagattagtaagaagtgtaccattagagaaatttagcaacttattaaaacggtttacatgttgagacagtagtgcctcaccactaacaaatacttgtttcaacgattttattcggttagtttcacctgtcacatcaagatagtgtaaaaatgcacttaacatagatggtacaaaatgcataattgtcacgtcattactttcagttgtctcaataatagcctgtggaaacttctccatccccggcgcaagaatacatactttggctccaactatggcccaccagaacatctcccatacggatacatcaaatgtataaggggtcttttgtaatatagtatcctttgaactaattggataagcctcttgcatccactcaattcgatttattaaggccgaatgctcaatcataacacccttaggtttcccggttgaaccggaagtgtatattacgtacacaagatcagagggtttgttaatacactctagattttcactctttccttcataggaaatcgaatctaaagccaacatatcagccttcaaactatcttgaaaacgatgtaggatttgcttttgcgtcagtattaatttagcaccgctatcttctataatgaattgtaatcgtgatgatggatggttcggggaaagcggcagatatgctccgcccgcttttaatatcccgaaaattccgacaaccatttcgatagatcgctctaccataatacctacaactgtatctgaaccaactccaccttcacgtaaaagacgagctaattggttacttttttcatttaattccttataggttaatgtttcttttttaaagataacagcaacctcatctggcgtacggactacttgttcttcaaacagcttttgtatacatgtactcatccgggttgtatcactcctttagttacaggtattttttcaatggcacgtttcgcttttttagcaaatcccttaccaagtaatagctgatgaatctgattactcccctcaacgatctccattgttttagaatctctaaagcaccttgatattgaataattatcattacaaccaagtgctcccataatctgtacagcattcgttgaatgccttgtacctgagcgcgatgcaaaatattttgcaatcataatcttttcagtagcatcagctcgatgctcatttttggccttacaagcttctaaactaagtagtatagaagcttctaaatctactcccatatccgtaatcatatgtgaaatcatgccatgatcaattagagagttaccaaatgcacttctatgcaatacatgattcccacatatttccaaacaagtacgtaatacaccaagagcagcaaaggcaattgaaatacgcccaaattctaaagcatacggtgcaaggtaagtaaaagcaaatcctggtctaccaatgatattttctaaaggtatttctacattattgaattcaatttctgccaaatatgcagctttaaatccaagcatgtctcttatatgagtaacatttacacccgcactatcttttggtactaaacaggcaactggttgttcaccatttagctttccaaataccaaaaacacatcagcagctgcaccaaaagtgatccacttcttcactccattaagaattaatttatccccgtgttgatcgaagttcgttttaatcatatttaaatctgatcctgctccaggttcagtaagagctaatgcagctatttgattaccagatgcaagtaatggtaaccactgatttttttgattttctgttccccattttaaaatcgtttctgttaccatcgtatggacattaaataatcccgaaagagagacactacctcttgctattgcttcagtaaataacccatacgttacataatcccactctaatccaccatactccgctggaagtgttccacctaaataaccatttttagcacaagtctttattatgtctgatggaatgccctgttcaatctcccaactattagcgtaaggttctatattttcataaacaaaatccaaaaaattctgatacattttatattgagatggctctaagtattgtttcatgtccattaccgaaccatttgcttatttcttataaaattaccaatagaatttacagacttatagttatccatatctaagtcatccatagttacctttatggcaaattctttttcaagaaaagtcatcaattggattgcaaataaagaattaactaatccttcttcaaaaatctcagtatcatcattaaattcaatacctacatgatcttgaatatacatatgaataattttttctaaatttttatcttgcattttatacacccctatttgtaatttttaattttaataagcgtaaaaacctttaccactctttctaccacattcacctgcatccaccatctttttaagtaatggacaacatctaaactttggatcttgatattcctcataaagtacattcaaagaatgtaatactgtatctaacccaattaaatctgctgtttctaatggacccattgtatgtccaaagcattttttaaatatatcgtctacctgtttaggcgttgctacaccatccattacaacccaagccgattcattcatgaataagtgggagatacggttagaaacaaacccagtctgatcattaaccacaattgcatctttatctaattgtttgaggaaagattgagctttttcgaccgtttcatctgaagttaaataccctctaataacttctatagatggtttcatatataccggattcataaaatgcattcctattattttatctggacgctttgttactcctcctacttttgttattgagatacaagacgtattgactccaaaaattgtatcctttttacatatctcatctaatcttctatagatcggctctttaatttgccagttttctggaacattttctactatataatcacattcagccacttcatcaagattagtagagctacttattaacgaaagtacttcttccttatgcattctaggaaatgctttattaattagaggagcaaagcgaactgtctctaatattttctcttccgctatttctaactgctcttctgtaacatcaattaataccgtttctagaccatgcagcactaaatctactgccatgccgatccccattgttccagcacctacaataccaattttcttgaacatttatccatcatcgctcccttaatatatttataatttatatctaaaaacttttacattgaagaactctttgcaggtaacgtttttgttctctctctttaatctgtttttcagtaagtgctgttttcatcatttggattgcttcttctacatcacttttctccactgaataccccgaattaattttttcttccaattgactttggaccttttgaaatgggagtactacctttttctgataatcacttaaatctgtattataattttttgtacttacaactacagttaaacaccctgatataacttcttcataatcagattcttgtaatgtaaaagaattttttgtatttaggatatctttctccctttcataattaaatgtcgatatagcagggttaatagcttgcagaagatacttcaagacttcctttggtcccatttcaatagctttcatagacccttgattcattagatagtgaatcatgtccaaccatttcacaggctttattaattgtaagtaaaggttttctcttatattttctacacctttatacattgaactatcatgattcgctatgacaggtactaatggctgtttcatatctatattttctagtacactcttatatttttcagcagcaggttgcatcataggagaatgaaatggcccacttaatttaagggggattgcaattcccccatgctctactaccatttcacaagctaactgaaccgcagagtttgtaccagaaattgatgttttatttggagtgtcataagccgatatatatacttcctgtcccttggttaacaattctgaacaaataccttcaacaatttctggagcaagattgttaacccatgccatagttccatctatagtcaatgcatagctactcaaaatcgtactacgttcttgtactaattttaaggtatctgaaaatgcaattgctccagaagcacatagagctgtatattctcccaaagaatatccaatcattgcctctggtttattgcctatttcctgttcaaaaactcgaaaagctgccatgctagttgttactaaagcagtctgtgaattttgtaacttttcaaggtcagctttgtatatcttctccatacaaagggaagccatgtctatttttagagtgtcacttgcttcttcaaatatctcacgtgctacagggaagttttcataaaggtacttacccattccagaataatgggatcctacgccaggaaacataaatacaatattcatctttttatctccctttttttcatcttaagctatcttcaactctatctaataaagctcgtccctcttcagtttttcttaaattcactaaatcaactacatagcgaatatctgatacatcattccatcctaaatccagtgcaagattcatatgctttaacgaaagatcgattctatcaattaatgaataaccacatgaaagtaaaaagtgatgccatgcatttaaatctcctacagtacgagctttttgtacaaactcactagctttattaaaatctgaatagtatcttagttgatggtatgcggtaaaaacgaaattatctaattcgttataaggaaacacataagctgtataggtttgaagatttgtgaatccaacttttcccgctagtttaatagatggaatacgaaaatcctctgtcttccaatgtggtgttcttccttgttttaaacagtcatccaagaatgctcttgcagccaaccaagcataccctttacctcgctggaataaatcataagtattaattccaatttccacatcagtatctgttgcaaaaaccgataagcaactagttacaacttgttcatgtaccattactacataaccaaatccatttcggatgaaatcctgagttgactcccaaaaatcaacaatatcatcccgtaccattgcgaactttttatctgatagcatgtcgattgtaatgcgttccaccgttacctcatcaggcatattaggtttagataacttattataagactccggatcaaaagtaaatgttactcgagtgtaaggtttaggaataaacatttgcaattgttcctcgacaacctgtttccattttgattcgggtaataattcaacctgaaaaaagtcatcccctatctgctgagcctcaggtgcaattacttctttaataaaagttggtagacttgaaacaaaattacttgtaggatcacctaataaataaaaaatttcttgttctgcccatacaagtgcacatctagggttattaggattatccacataaatatgtcccttattgtaaccatgaactataccattcagtattggatggttcttataatcaacgagaagtggagatatttgtttgaattcatccttttcttttaccaattcataaatcatattcttaaaagtcctcccttttgagaacaagtgtgaagtgcatgctgcgcaataattggctgaagtacctgcgaggtaccttcaataatttctaaaacctttgcttccctaaataaacgctcaacaggatattctcttgaaaacccgtttccaccaaacacttggacagcgtttgtggctaccttcatagccatctttgaggcaaaatattttgcaatggttgtttcaattacagcatcagtatgtctatcctgacgctttttcccagcctcttggcataacgaacgagctgcttttatatttacacttgcttctgctaaaattgtttgaattgcttcatattcacatatatatttatttccttgttttcttcttcttgaataagctaccattgcttctagtgcttcttgagcaatggctactcccgcccaggcaatactatatctaccatgatcaagagctgtgttaactacataactccatccacccccaattggtcctaacaaattttcagctggtacctttacatcttgcaaatgaatctcagctatatgcgaggaattacttgctaacagtttactcattttatttgtagaaacacccgtcattgaccgttcaacaataaaagcgctaacttttccctcactagacgcaaaaactaaaaaacaatccgcaatgtcagcaaaagaaatccattttttgtgcccattaagaataaaatgatcattaacttgtttataggaagttccaacagcttttgcatcagaaccaacctctggctcagttagggcaaatgaaaataataggttcccctttgccatctcaggtaaccattttctcttttgctcttcagtcccccaccttttaattgactcccctactaaagattcatgaactgtaagtaattcacgaaccgaattacaagctttaccaatgatttcagtaagacgaccataatctaaagaatcaagagaaagcccaccatattcttttggtatcgttgcacccaatacaccataacttgagatttcttgtatcacatcatagggaagctcttcattactttcaaactcacttgctcgaggccgaagcttcttttccgcaaactcatcaactactcccagaatctcttctgcattactcatactgtgaaattcccattcttctttttgttaattagatcaaccatattattaatagtagaaaagttaataatatcaagttcatcattatctactactatatcaaactccgtttctatgaaatttaacatttgcatagcaaagagcgaatttacataacctttttcaaatatgttgtcatcattagcaacaatagtttcctctgcattaaaaataataagattttttttaatgtattgacgtattttttcatgattatccatgtaattactccttctgagacctgggaaatcaattaacctatatcccaattaaaatcagtctctatttttattttttctttctcctgagtcgcagataaaacaagttctttttcctcacttgttaacatttgaatatcttttagactaacattaggatgagttgttatttcttctaatagaaggttaaatcgccgtccaaattctactattgttgatttatcaaataaagatgtagcatattcaaaagtgaattcatatatatctttattttcttcagcaataagagttaaatcaaacttacttgttagtgtatctgtgtttgtttccgtgctaatttctaatccatccacaactgtatgtttttcatccgaattttgtaatacaaacatgacatcaaataaagcacttcggcttaagtctctagaaagatctaatttttccactaactgatcaaatggatacacctgatgttcgaaagcttctaacgtatcgtttttcacttttttcaagtgattaataaaagattgatctggatttatttgataacgtaatgcaattgtatttacaaacagccccataagaggtaacagatcagcatgcggcctacctgcaactggtgatcctataatgacatccttttgttccccatgcttgtacagaaaaatagtgaaggtagccataagtaacataaaaggtgtcgtatcagtttctagtgctattttttttattttccgagtaatttccttgtttacttggaaattatattgttcaccctcaaaactctttacaggtggccgacctcgatcatatggtaattcaagaactggtatatcccctgagaataattcttcccagtatttctcatggatatcaaattctttagaagataataatttttgttcccacacagcataatctttatattgcaaacgattttccggcaatgtttccccagcatataaggccttaaaatcatgcataaagatacttaaagacacgccatctgttatgatgtgatgaaggtcaattacaagtaaataactattatcttttagctcctttagtccagcccgcattaacggaaccttagaaagattaaatggttgcaaccattctttataatctccctttatcatttctagctcaaatgttacctgttctaatactctctgtactaattgatccccctgccactcaaactgtgttctgagtatttcatggcgtttaataagcttttcaaagactaattctatccttttccgatccaccgttcctttaagaataaaacaacttggtacattgtatgtcatctgtaccccatccatctcttgtagtaacatcattcttttttgagtcgatgaaaccgggtatacctcagattccggtactatttctatctcttgcaacctattttcttttgaatttttaataaaatgacttaaagttcttattgttggatactcaaaaagatttgctaatgataattgcacattaaattctttccatattttagcgttgattacagtagcatgaagggaatgaccaccaagtgcgaaaaaattatcttccacaccaatacaaggattacctataacttctttccatatatcaactagctttctctccatattatcgagtggttttacataattagtagtctcttctatcgatggcgaagaatctatgattacattctttgtattaccttttataacagaaacaagaaatgtcattatttgttcagctaaattttgctcgtattctgcagcatggtgaattttatctgaaatgtttactattccttctttagttactgattttgttaagtgcatttttatcaatgatccacgaattactccccaattagcagct
